United States Patent Application Publication US 2026/0275333 A1 - sequence listing, part 28

SEQ ID NO: 3045 - RNA, 64444167 nt, Homo sapiens (residues 57,999,754-60,147,892 of 64,444,167)
  source 1..64444167: mol_type = mRNA
aaaaaccttttcctcataaccccacagcttataaacgtttgaacaattatgactgtcaggtgcacaaacaagcccctcacacacagcctattgttctgcagatggaaacatctgttagattagattattttttaaacctggggtgagaagagtgggggacgggggtgttgataaaaggcttcctggcctgggcttgtgaacagccacactgagaaaatctggcttttcagaaacttcccctggagccaccttccttcaccaggacacaagcttaactctttctaaccaaaggcttctttgccgtgggcacaatagcccctttcttgcgctagagttttttttaaaaaaatccaaatggtgtgtctaagcccatgactgactccaacctaacttagggttttgttttgttttgttttgttttgttttgttttgttttgttttgagacggagtcttgctctgtcgcctaggggggagtgcagtggcacgatctcggctcactgcaagctctgcctcctgggttcacccaccattctcctgcctcagcctcccgagtagctgggactacaggcgcccgccaccacgcctggctaatttttgtatttttagtagagacagggtttcaccgtgttagccaggatggtcttgatctcctgacctcgtgatctgcccgcctcggcctcccaaagtgctgggattacaggcgtgagccatcgcgcccggccaacttgggggtgttaacacagtgatgaagggctcagggtttgagagctcagccttgagccagactgcctgggtttgaatcacactagctttgtaattggcctctctgtgcccatctataaaatgggagcaatcattgtcggctttttagtgaattaacaaaaatattacaagagctgagagtagatgagaccagcacatagtaacagattgttgttacttacagccatgtgctgcgtaatgacattttggtcaaggacagaccacctatatgatggcggtcccacaaaattataatactgtatttttatggtaccttgtctatgtttggacatgtttagagatacaaatacttactattgtgttacgacggcctacagtttcagtaagtcacatactgtccaggttttcagcctgggagccatgggctgtatcctacagcctgggtgtgcagcaggctgtgccacctgggttgtacaagtgcactctctgaggtttgcacaataaggaagtggcctgatgtcccatttctcagaatgtatccctgtccttcagcaactcatgactgtattatgattaagaacttagtaactcttccgagatcatggaggaaaccatgaaaatggctaaatgaaaaggttaaatggttactatgaaaatggtaaagtgtaaatggagataacgtgtgatgttattgtggtaataataggaccctcctcctagggctgctgtgaggatgaaacagcactgaccatgccagggaaattgcttgcagaatgccctggctcaatcaaagattgcttgtgaaagctcataaggcatgcaatgggaccctggctcttacctttgtgacaggaaagccgcctgccttaggctgtgagccatgctatgaaacgtactaacagccgcagaaagaacctagcctgtctgcttctcatatgcctgggccccgttccactggctcccagatggccgtgacctcgatacggtgtgtgagccagtggctggcctgaccccctaatggtgaccgcccgcctcgccaggatgacctacatttccacagtggcggctggagcagacattccagggtaattaacaaacacatgcacacagacacacacacatatagacatatatacacacagaaacacacacacacacacacacacacaacggctcaggcctggctgtagctggcacgctcgctgtctagacagggctgggagctgaatggcctcccgccaggggaggtaggctgcttggggctgcaaccaggacagctgaggtggggtgagaggcttttcctgttcactggggcagagacccctgagaagatgagcagcagtgatcgttcctccccaccctaaacgggagcttccggccatgtgccttccaaggaaagtctcctcaggaaatcatcaggcaagagagcccaggtccagctacaggggagcttgatgcactgctgtctgtaataatgaaaaatgggaaatagcctttcaaaaagagttagttaagcatattatggggccatcacaagagggaccagcaagtggttgctgacaattgtgttgaaggagatggtctgatggcatgtggtgactgtcataaaatattaagtttctaaaaagcatgattcaaaatggcatgtcatcagggactgcagtcatttttctaataggtgcacagacgagtcattagacaagcacacctaggaagctcagtgcttatctctgggcatgatatctggccaccagggcactttgcacgctcccactcatggttggagtgcaaataccaaggacactagaccaagaccctgcaccagctggcccaacaccaaggttctcgtcctttccctgctccaaattccagtacacccagctggtattttccaaacgccagtcacgcagggaccaccttcatgacttttgcccaccacactataatttacttagaattattctctaaattgactcacgattttcacaaaagcaaattgattttaaaagaaaaccttatatcacagttgtagttgggaaaatcaaaaccagaaggtggctgtaaagataaacacatcattattaattttaaaaaattccagcaacctgacataagaacagaaagccaaacaccgcatgttctcactcataagtgggagttgaacaatgagaacacagggacacagggcggggggggtatcaccaaccggggcctgtcaggggggtggggggctgggggagggatagcattaggagaaacacctaatgtagatgacagcttgatgggtgcagcaaaaaccaccatggcgcgtgtatacctatataacaaacctacatattctgcacatgcaacccagaacctaaagtataaaaaaaaaaaaagtccttgtgtgcctcctaagatcatcttgccaatgatatgtatgccgcacgttggacgacactgccttcactcaacctctttatttacaacatgagaaggctgaggttcagaggggacaagatttccctagggtcattcaggttgccaggagctctgggtgctggttcagggtctgcttacctgaacctgtccttatcctgaccttctcactcatcctggcaggtctgtctccatggggatggggccaatcagctctcgacccaacccatcactgagctcccaggtacctggctgagccacaagggtccagcctgtccccctcccgccacatcctctgttcagtggaggtcccacatatcagatattcctccaatgctaagtagaaagctcaaccgcagtatatgagcttcagattaaattatttttaatttcatggtgctccgttccacagtcaattaattccatttcattttcaagggtcccatcaccctgccttcttctttttctagcagtttcagtgattttctggaatcaatcaggaattgtttgtgtttggttttaaatacgtgtaaacgtatggccggtctgtgtccttttttccgttcctcctcctgactgtacccacgctggacaccccaggctgaggctggagggggcatgaggagcgggcctggcaggcaggtacctggccccttcgggaggtgggggacagaggagcatttccacatccaggtgggtgcctgtactacagaagaagggaaccgctgcctcctggaggccctgggctctggggactcccttcgtttggcatccctgctgtcttttcctcttaggaaagcccttcaccacctggagctgtctgcaagagcttggccctgaatcctttacagggtcgggcatgtgactcacactggccaatcagagtagtccatgccctgggacagcaagataggccgaggagcagtcacatgacctaagcagggccagtgtcctgtggaggaataaaatggcttctgtgtaagaaatgattgtaatctttttctctaggcttcttagctatgaaggtcatggaagctcaaggctgctggagaccacccctgctgtcacttagaactcatcctgcctgatcatgaagccaactagcaaaaaggagagccaagagatgtcaggaggaaaataagtcctactgttgtgcagtaaggccctaggtatgactgtgcccgaaggccaccaaactgcccaagtttgaagttgtatgtgccagcaaatttcgcttttttcgttgttgttaagttagtttgttatgtctccttctcttgttcaagtcaaccaaggaacatcactgtgtgtcacgtgtccaccttcctttcccttgcctcgcatgccctgcctcatccaggcacagcctggaaggtagaggtgagtgacaagcacgcaggaagctttatggaacatccaacacctcaagactcagctcagacaccacctcctccaggaagcctcgcctggtgccctagtgtgccttctcaggctggttcatagcccatctctgctggtccacagcctttattgagggcagcaccatgcataagggctagactctggaacccagatgtccctgattggaatgtcagctcttgccagctgtgtgaccttgaacgtacgagtaacctatccgttccttggtttcatcacctataaaattaacatcagtctctctacctagtcctactttgttgtgagatttgtcactgagttagaacagaggccagcacatggctactcctcaggtatgaattgtattggccatcatttttatgttctgtatcacttttgccataactgccttttacttgcttgtcttaaaccacaagccctttcccttctcttttctttcaatacctttggttctccagaccccacagtgcctggcatgtaatgagcctgagagaatgtcggttgaataatgtgtgcccccaaaaatgaacaggcaaatctatatcttctgctcttccttctacctgtcaagaactctgactttgccatctcgtttctggctctcatcctaaaaataggataatgagcaagcgggaggtggagagaagtagaagtgaaagggaatgaagacaaacacaagggttggggggtcaggagaacagatgggctgggcgggtcatggaggtgctcacacctgactgggcactggaatcacctgggtgcaagggttcccaaacaagcaccctgagccctaccctggagactcccacctcatctgtctgggtggggcctggaacttcccaggtgatcctgtgctatgaggccagggctgagaaccctgggacggagaatgggaggagctttgatgcacatgagaagagaaatgaaagctccttgagtgtttttgagagatttcagcaaagattagttcctgttcaactattttgaccctcagcttgttgtttctttgactgtgacccagttctgagactgggtgccaaggggacttggttttgtctaatacaagtgtgtgaatgaatgaattaatgagaggaggtttgtctcccaacactcacaccagtaatcacagacacaagcagcaagggaaggtggaaaagatgttccaacacaggggactcaagggaaacagaaacacctcgtccacctcatcagcctgtgttcaagggagagagaggtgctggggttgatgactgtggccacttccctgccctgatcttaattacaggagacccactggctcagcagtctgtaagttgcaggaagagaaattagatgtgatatccaaatcttttttttttttttcttttttgaggcagggtcttattctattgccaggctggagtgcagtggtacagtcatgagtcactgcggcctcaacctcctgggctcaagcaattctccatctcggcctcctgtgtagctgagaccacaggcatggaccaccatgcctggcaaatcaaaaaaaaataaaaattatacagatagagtcttcctatgttgtccaggctggtcttgagctcctgggcttaagggatccttccacctcagcctcccaaagtgcaggggttacagacatgagccactgtacccaaccccaaatcttgactagtagcatatagtcagctagatagacagacggatggaccattgcttgtgaacttctctagggagaccctctgaagaaagtgtctgagggtcaagccatcatcagagcagctgaagacaaggccccacccacaacgggatcgtgggttcagcaaggacccttcccaaggaccagtcggcggggctgtgagctcctgggggcaacaggaagaggatttcatgcaggactcacagtgcctggagcctgttccacttaagagaaattaagcagtcacgagtatgaaaggaataatgtcactcctgggagttcctgccactgtcctgtctttaataagtccacagggtgcccaggcagtttttggtgcttggggacacagctgcaaacaggtcaccttgctctgaaactgcaggtgctcaccatctagtgtctagcagggaaagacacaccaagcagagggatggcatgggtgagtgctctgagcaggcccgatgtgttcctgggacctactgagagatgcctacgaagctgcctaaacaggaaaggctgatccggcttgcggttttgtggacttaaagggagaaatataagaggaggggcaagaggagttgagggggacgaaggctgtttcctctcctccttctctgctgggctcattcccacggccactgcagcaccccagtagctccaacagaaggacccctggagtctgtgtgtgtctgtaggaatgggaccaaagtgccaattcctggctatctgtccaccatgccacctagcgagctgcctgccaccagatgccaccagagcgggacagggacaccggggaggggatacttggccacatgttgcctaaagaaggggcagatttgtgtttgtaacaagcacctgcaggtagttcttatcacaggagggacattcgttgtctggtgcccctcatttctgccacccttcccaagctggcctcattctgtctctctggagactccctttctgccacccttcccaagccagcctcattctctctctctgtagactcccctccttggccctgccacccctgtgcactggcttcaggagacttcctgatttcaagcagccaacacagcccattgagaatctgtgtgcctcccaggtctaaattcttctgagaaagaacttgatttggatcggggcacagctctggtccaatcagctgtggccaaggaggggtgaggtcatggtacaactgtggctcctggggcctcccttgtgggtataaggaagagagttctgagaggtacccatccaaactgctatctcccatcaatgcaagcttgtgttccccaggagaccccattccacaactcaggttatgaatttctctctccctggtacatttccagacctcacagcacacccagcttcaaaggaatctgtccgaaaaacttgtaatgacaatatgatatgcttcttcaagaagtttctagaatgagcgctctgagcagacaggggctgttgccttgtttgtcctgtgcaccccagccactcctgccatgtccattaagcacaaggacctacacgccattgtcgctcactgttatgggctggattctgtcccctcggaatttgtatgttgaagttctaacccacatcttcaaatgtgactgtatttggaggtagggcctttaaacagatgattaaagttaactaatttcataaggtgggccctaatccagtgtgactggcatccttgtaagaagaggaagagggaatagggaaggacacacagagagggcacgtgaggacacagtggggaatggctgtccgcaagcccaggagagaggcctctgaagacatcaaacctagtgacttcttaatcttagacttccagcctccaagactgtgagaaaacacattactgttgttgaagccacctagtctgtagtattttgttagggcagcccaggcagactaatacactcgctaaaggtttgttcctcactaaagggatgcaaaaatggtggaactgagtcctcccaccaagagttgggacctgtctactgactgcaaatggcagtctaggttagctcttggttaaaaagagaaacaagaaccagtttatcaggagtcctggagctttcactgggtgaggacaggggtcttctgaaggccccagtgtcagggcaggaccccgatgtgtgtggagaaagtgacccactactcataaccatggccggcatgcaggggatacctgatggctttgctctgtagtcctgccctacactaagcttttgagttactgtctactctaaactctattttcaaaatttcttagactctttttattggcaaaagcaaaggactgaatttggcattggaggtcagaccgctctagtttgaaaagaaaaaggaaaacacatctccatgggtctttgactacacagagatcaaacaaaaccctactttgcttggtgatatttaggaatggaggagccaggctgcttcctggggacgaagcagcgattgtgcatcgggagaggagcagcgtgcctccctctcaccacctcggcagctccgctggaaagagatcctctctctccactgaccaccgatgtcagcactcccgtgggacagatgctaggccgggtgcaaaccacccaccaggcagagcagtgggagggctgacagccaagcctggccacatgggcacccctgaagcctggggtacagctggttcccaaaacatgtagagagagtgaaaggagagacggttccctatggaaacaggagaggttttaactagaagaaaggggagtgggtatggtacaggccgcagcgcccacgtgctgctgagttctggaggacactccctgttgtatctgaacccaggttccgctgcttgcagctcaaaagccaaaactcaggagatgggagttagtggaaagaaaagcaggtttattgggagagccagccaaccgagatgatgaactagcctcctgaagtattaataccatcttgagttaagtccatacaaattttaggctctttttatgttcaggacaggggaggaggaggggattggggtggagatgtaacagatgaccacagacattggcaccagtgcgggtccaaggagatcgggaactgctttgtccttggtcaggtcacgatgctcctataaatctatttttgaaaacatagtcagttgtttacatactttccctttaatcccagagttagtttttaaaactccatgattgctgtttttgcatattatctcaatgctctaaaattatcccagcctccgcgcagaaatggataaagccccttaagcaaaaatggagttggttgtgttcgttctttgctgcttccctgataacagtcagttccccaaatctctctcacatggagcagcccctccacaaccccactgcctctgtcttggggcaccccttggtttctacataaggggccctcacccatctcacagttccagtctcttcgcacatccttctccacccagctgaggtctttgaacagaggtggcagtttggggactaggatttggtgagactcaatccaggtaaacagtaccttaagaaggcttacgaatggacgcttgggacctgtgttgatcctggttctctcacaaattagcaagttacttaacttctctgtgcctctgttttgtcatctgtgtgttgggtacagtatctgtaccaatcttagagggttattataaagagtaaatgaggtagtatacatcaagcactcaaaatgtgagctgttattaaaatatatctcgcatctgtccacttctctctatctatgctgccaccacctcatctgagccactgtcactggtcccctgggccatatcccagactctttgtagtgtcctggccctcctctgaccttgcactgctctccattctcccattctccacgcaacagccaggatgagactgccagatgaaatacaggacacccggttaaatgtgaattttggatcaacagtgaatatttttcagcataggtatgtcccatgcaatattcattatatacttatgctaaaaagttatttatttgaaactcaaatttacctgggcaccttgtatttttatttgctaaatcttgcagccttaagccagggagaaagcagatcgttttgctcctagcttcaaacctgcattgagttcttggcacagttaggacagaatctgtaccctgtcccgacatgcagggcttaacctggcccagcctctgtgggccattttttttcctgtgactattattaacaatttagcagcatcagtggccaggcattgccttgtcaggtcacacactgtgcctgctccccaccaggggactgatcaaagaataagaaaatgaagccagcaaggaccacagggcaggagaccgtggggctttgtgaggtgcgtcccatcctggtgtggaacccagaccagctttccgcttgcatgggaaactgtagcagctggaccaccagcctggagcgagtggcaagggggttggtccagactccatcctgtgcggcagccaactgcccagatctacttcgaccagccctgtgaccttggacatgacctttacctctctgtgcctcagtttcctcatctacaaactggggatgctggcggtgtctaactagcctcagggctgttgtgagataaccaagttcgcacctggacatcagctgcggcagcacctagcagggagcaaccgaaccccagccttttcaattcattcttcaaggccaggcaggactgcaggcgtgggccagggagagggcgcaaacagagcttgctcagctgaaggtggttctactggaaatccagctgccccagttgtggcccccatggcctcagggtggagcagcacattgagacggagaaggtggtcgagggcccagccgacagtttccttcctcccctcgcctccctgggagcctgcagccttcagccgtccctccccgatctgtgttcctggcttgcctgctccgggtggatatccttacatcaggggcagggggctggcggggaattcaatcggtctctgcttgggtcccttgaccttctcccaacaggctgagcttctcttcctggggagcctagaatcccctggcgactccttccctttctcttaaattgtggccacagcatggcgcccagtccatggtcagaatgcagagtcccaggctagggactgagcttctcaccaagccagatgcaccccccaccaggaagcactgcccccgccactggattgacctcgtgtgccaggtgagccaaggacgagggttttgggcctggctctgggtgcctctaaacagacccgcttcccagaccccgggctctctttcctctctcctgtcactgtgcaggtaactgggctccctgatgctgtggtgtttctgaaatacttcgatgtagtcaaaaatcttcattgagtccctactgtgtgccaggctctgaactcagtgctgaggacatgaaatgggcagaaggggcctgctcccacagcgtcctgggctgggacagacacattaggagttaaggacacttactagagtgagtatgtgctgaaggccataagcaggtggagatgaaagggaggagcaggggtgggcgccattgtagagaggggctgtttgggacccacttggaaagaagggccggggcccctgaggaggtggcatttggaggaggaacaagaatgagctcagcagaggcagcgaagctgtttccaagggccagccagtgcaaggctcccaaagtgagcagagggtgatgcatttggagaagtaacaggaggtcactgaggcaggacacagggcaggggaggtgacaaggggccttccaggccaaggacaaaagaagccccctgaagggtgggaaacgcaatgcacatccttgcagtgggttaagccgtgtccttccaaacagacgtccaagtcccaacctccagcacctgtgattgtgaccttacctgaaaatagggtctttgcagatggaattaaatcaaggatctcaagaggagatcatcctgaccttcagggtgggctctgagtccaatggcaagtgtccttgtaagagacaaaagaggagagacacacagagaagggaggcctcgtgacgatgggagcagcggttggggtgatgcagccgccagaacaggccagcagccacaagaggccagaaagggtctgtcccaagaggctcggaagggggcttggccctgcccacaccttcatctcagactctggcctccagaactgtgagaggacaaatgtctgttgttttaagccacgcagtttgtggacattttttatgcagtcttggaagctaaaacgatgtttaaaagctctggctgaaataggcagaattggttgtggggcaggggaggaagcgggagccgcctgcgaagccaggacccctggagcaggatggcagctggaatccaggcagtgacggggaagggaggagagtggagatggagatatgcctcaataatagtgaagctgaaattttacatccccaccccctgcccagcaccttgctgtaatggccttattcagattttcatatttaattctgtattaaacccaggtgtcagtgaccatcaccatcaccattttatagacgaagaaccaaaggaacagagaggttcgttaacatctcccaagaccacacagctagaggcagcaaggcacagattgcaacctaggccagaggatcaaaggaccacgtatttagccaccccaagctcactgtcatgcagtcaaattaacagcacttgctgggggtagaggtgggtggatgatgacagagaagaaaacaagagccgctaagtgggtggcactgcttggaagactgcggggtggacaacctgtctgtctccaggaggaaaatggccatttccttcccaggacgcccattgagcaggaactttctggagctgggtccttcaagatgggcctcccactctccacgttctgccattcggagcaggcaacctgctgcggttgtattaattatgtgatggcaaatgaaagcccccagctgacccaccgggatcataaataacgctggcagaaaatggatttgggccacgtgtctcagcagcagctttttgtggcatgaaggttggatcttttccattctgggactggtgtttgcttagctgggaaaccactcgtcttcctgttccagttctccccgtaagcattcttttcccctttttaaacaacaataggggttactatggaaatcagagtaattttcatcccaatgtagtccagataaactatcaggcatttgcggccaccttgcctgccacccgtgctctggtctcatgactagacaatttgggaacgtctgagaaactcacattctcttgcatcgatttcctaagtgggtcagagcttggagttcttggcaattaatggctgagttagtgaaggcagagcataaaaatttcatgagcaaaatacgtcttccttattttgaaactttaaaaagccccactcagataaatgacccctgttgtacctgaagtactgagtaaattaggtgtaattttattacaatattgattgctgccaccagacatctcgattgtattttttagccttgatcaaaggtgaaaatggcatcttttaatcgagttgaaaaatgcaactctgtgggaagatggagctgagctgaaggaggaaggtggagggaagagagaagtctcagaccccctgttggggaaaatccacaacttttcagcagaaacagagattgtcagcaatggctgccagtgaataagtattcagtgaataataggaaaagaatatagtaggcactcaataaaaaccgcacccctactctgtaagcaagaagctctgaatatgacaagagaggctcttagaggtgctggaagtaatgaaagtctccttaggggcaagaactgcaggaaaacgaaatgatttctttttttttttttttttttttttttgagacagtctcactctgttgcctaggctggagtgcagtggcacactctcggctcactgcaacctccgcctcctaggttcaagcgattctcatgcctcagcctcccaagtagctgggactataggcacgtgccaccacacctggctattttttttttttaagtagagactgggtttccccatgctggccaggctggtcttgaactcctggcttcaagtgatccacccacctcggcctcccagagtgctgggattacaggcatgagccactgtgccagcccacaaaaatcatttcttatgtctcatgtggccctggcacagaagaagtgctcaatgaatatttttggaatattattgctgaacttatgaggtatagaaatgactgttggagaggggtgtctttcagggaccctttctctgaaggaagagtgacagctgcccaggtgagagctgaggtcagggcatggggatggaagaagaatgttctaggccaagggaagaccctgccgttcatcgtgactgcaaagcagacagggccctcgcggtgagataactggcccttgtgacaataaatgttagtgtagcacataaggctgagaagagactgctcacccctgcaggtccagccccacacagagcaggggacacatgcagtttgctaaaggggaaagaaagagacaggagaaagaagagaggggagggaggaagcagaggagagggaggagaggagctcctctcgctctgaaagttccttcctcatctgtagacaattgcacagctaacataacctcttttgatgcaacttaaaaggaggttactgtttgaagaatgattgatgacgtctcctgtggtttacctttcccaagtgactaattgggtgcattcacccacagcacagagaggcaccatttgccctgaatgatttcatgaaccagagaagttgaggggctcgggtcaatggctgtggtgcatggaaagccatggtcttcccctacccccaaccccaccctaaaaaaatctcagctaggacagattaatcacaggaattgactggcagacgggcttcgtgtaggaagaaatgccaggaggctttggataacaggggctggtggaggggggtctcccacctgcagaggccatggtaagtgggaggtatgatgtgcaaaatagacacttggcccaagcctccatgcccaaaaagtcccagagtacactggaaagcttctccacttgaagctttgcacacagtcacagagccaccctggcaggactggaagaagaacatgtgtatagtatgaacatctctaaactccatcccacaccagtatttgctaagaattcatttttttttttgagtgctgcaattatcttgtggacagtgcaaattatatccaggggtgtgctggtgaaccagctctccacaatcaagaaaggggagatcccccttcgtttgtgttgtttgccaattaccatggtgtaaatactgccactatggctgattgcaggccattgatggtttaagaactaacacaaaagtttcctaaatatttaataatcgactctcataagcctcttcaagctggcattatctcagtttgtatataagttattatttattaaatgtgaccatatgaagtatgctgcaattttgcaaccgtgcattggtatttctttatggttttaatataccaggaggctcaaaagatggaaagggtggtgtagggtctcttcgtctcagaaatcacatttgtaaaatcctctctgctctgctctgttcaatctggtgcctaaacctggaaagtgatttttcaccatctctaccttcctgcccatccttccctccttttacaaacatttattaggccgctactctgccgccccacatcctccatgaaaatgtccctcatccagtcagacgtggtaaatatctcagtcactcctgtcttccttctcagcattctaggttttaccctagagaccaaccgctcattcattcaagaaatgtcaactagaaatttattctgtactgggcacgtgctaactgctagagcaaaaatagagttatcttgttttaaacaaactttttggagaatacaataataatacatattcacagatgagcatttggaaaatgtaaaaaagaatacaaaatcatctcataacctgtaattccattatcagagataatggcggctgatgttttggtgtgtttctattcagttatttttccttgtccaataaacaaggacacaagaatttttttataaaaatgatcataaccatttaataatacaatacaaacctttctacatcatcacgtatttttctgtacgatataattttaataattgtacaatattctattgtctggttgtgttatgatatacacccaatctcctttgttaaacacttcggtaatactcaatttcttattctgaatattctgaatcattctgcaataaaaattctctgatgaatgtctgcacatgcccatgattaattacataggacaaattcttggaagaatagtattttccaggtcttttatggtttttctttttggcccaatagttgtttaggacataattttttagtttggtttgttgtgttttatttataaatcttagatttttagcatacttcttaccaagattaacatagttacaaaactttcctcaaatcataaatgtcagcccaatgaatttgtatgtaataaacatgcccttataaccggtgcatagatataggaataaaatatcaccatctcctcagaaaccccattggtgtcccttctagaaattctctataccccatccaaggataaccattatcatgaattctaacagcatagattagttttgcctgtttttgaactttatgtaaacagaaccctaaaatacaaatgcttttgtgtctggtgctctcgatctaccctacgcaggcaagattcccctacattgctggatgtggctatgtgtgtcaactttcctgagtagttgcattgtgttctggtggatgaaaaaacccataatgtatttgtccttttactgttgatgaaaatctaggtagtatcacccatctgggtggtctcatcttcacccatctataggatcaaatttattaattaaattatatagagcttctctaggtatactttcatagttttgtctctagatctttgaaaattaaaatggaaagaggtatctaaaatctcccactgtatcgtatcacagaggtgaaggagtcggcccaagaccacactatccagagaggtcaggaggcgtttggactcagccacccggccccgggcagccgaggttaacggaacccagcgcccgaggctgttgtgaggatgaaacatgatcatggaatctgaaaactcagcctgacgtggaaaacatgattgcctgttaagcaccggctgctcattttcatcttctgggtgaaatgctcaaagggactggatgaatactgagtgagtaaggaataaatgaatgaatgaacaaatgaatccgaatgccctccaatgtgcgtatgtgcctgggtctgttgcagaaagccgcctttgttgtctagacaagaagagatgtttgctttgtgagcccctggtgggtctgcggaggtggcagcccctgggggcagctggaccttcccctgggccccccaccagggtgactgatgaggctgaaggggattttgccagcagctgcggctgccagcccagcctgccatgcagacctggtgctctgggctctggaatgaaagcacaatagtggcattgtcaccacttccctgtttcttgattgtcccagttactcatcaaggatgttggcgagcccagcccggaacacagcgtccttgtcccttgattaagcagcagacacgctcagacagtggccctgcaggaggtggtcgatgaattcatctcttggccattcagagaacccaacagccacggacttgggcagagatgggtcaatgggaggtcatgccgggtggtcccctccagaggccacccccaaagggaaataatgacagcatcctccccccaggaggtgccccagacaaggctgatgaaaggggtggctcggtggcttcctgtggaaagcccgctctgggacagacccctgtgtgagaatgatcctgcttgctgttatcactccttgatcaaaaccttcagtggcttctcacaagcagaagacagtcaaaacgcctctcacagagccctccgtgatttgaccacagatcttcccgctcacgtttttgctcaccgtgttctgctcacacctgcctaatttctggccctgggacgcaccatggtctgtccttcctcaagcctctccttccgcctgggtggatctctgggtccaccccggcaccagctctgatggccgactcctagccggggctgcctggttcactttcggaccctaacacgtggagtagcacctgcccagaggaggcactggagagacattcactcaggctacttcccagcgcctagagcaaggcctggtacatactaggtgctcagcaaatatggaagggagaggggaaaacagaagggaggaaacggtggagagaaattatcatgcagcaacttcagagacagcaaggggagtggaacagagaaaggggtgccttccaacaggcacctgggaccccctttgggatgggccccctgtacacgcccataccactctccaaggctgaaagcatctcgtcctccactgccaaagcattccaggaacggggctgcacccagagcagcaggaggtaccatcccctctcctaccctcacgtccagctcttctccctgctccatgatccacagtgagggcctccctcgcttcaagatagtccatgactaaggacctgtgggaccatcacatttcttcatctcttcaatacatctttttgaaggcctgtgatgccccatggatggggcgaggctccggatcaatgaaggcaggaaagtcacacgtggccccacctgtggcaagcccccagccagtggagctgggaacatactggacagatgagagtcagcccatgtgttcaggaagccaatctgatttttgtcatccactggccctttaaacttgtccactgggaaggagccttgtccctgaccagatgggagctcaggcgatgaccatgactttgctggtcgctttctagcagtagacagtcctgtggtcagtgtgagtcacagacggcctcagtctagcagtggaaaaagtcctgtcctgagtaagaatcaaaacttgctccttgattcagcacaatttgctgcacgacgggtgcctgcggtaagctgactgcttgcagggaagtggcctggacctcctctctttgcccacaggctttcgtccatcactccgacacagcctcctcactcgggctcaggagccaggcagggtcgggagggagacgaggtggacagctgctcccccccagtcccgtgtgtgacagctctgaactgcctgggacgcagcagagcctcctccgatggactgacggctctgtggggatgagcagggcctctcctacctggccgcacccctgtgggccattgtcccggagaggagcccctctctttaaggggctcagttgcccaggatgcatgcagcattgaccgtctcttggaggagtttcagcttttcagaagcagccgcagttcttcaacccaggccccttttgccctcaggcatgagtcccttgagccctccaaaggccgggcgcggacagagctgtctgcatgttcccacaaaaccctcgccaggtatgaagtgaggggatcaccaccctccctccttggagcggagagtgctctgtgctcctgcaactcacaaaaccttcttcccatctccacagaatcaggacacctgggttcccatcccttctgcccacaccaaggcatagccttccacccctctgagcctcagtttccacttctataccaagggaatggcactgccctaaccaggctctgaggggccagatggagtcacgtgcacgcacacatgtcctgtttattattagcggaggtgtggtgttggcatggtgtgaggatggaaggaattctcaggacccttccagggtaaaggaacagaaacatccctgaccttagcctggcctaaactagggattggctcctggccctgaattctctgcagactctgaactcagtgtgtgcccagcctgagccatagccaagaaccaggtccaagtgcactgaatatctcccaagctgggctggacaccctcctgccacgtccagcccattgtttcaatatgaagcagaatgtccccctcagaacctggggctgtgtacattttgcagctccagagccactggcatcacactgcagaccagaaactttccatgggaaccgtgggagcaggaggaagaccaggtgctcagcggccagggcagggccatcctggagctctcaagcccgggcactggagccagccagccatgtgtccccttcaagaagtctcagaatcccaaatcccagctgcagcctctggagctggaagacaggtcatgtcttagtgaagttctttccctgagacccaggtcatccaggacaaaagcaggaactggaatgagacaggaaaggcggtgaccccccagtccctggctgtccagccttcaggtcatccatggatgctacaacatgtattgagcaaaactccaggatgtgcaactggggtaaagcagaagcagaacagacaagccccaggggatgtagatgctgcaggagtgggcaacagccagtaatcaggaagcagatgcattgacaaaaaaaatagcaagcaaggcaaagcaaaccccacgcaggaagcacacaggtgcggcccgagtgaccacggggaaggggctgctttagccgcccatcgtgggggcctcctccaagcaggtggaatgtgattctgcagctggagtgatgagagggctggctaggggaagacccagcccgcagtggcagatgtccaggccaagcagccagcacaggcagactgtggggtgatgaggtgagagcttgcaggggaaaggcctgggctgtgatgagatgaaaacttcagatgaaaagattttttaaattgcccccttattactgtatcagtcagggtttgaccagagaaagagtcagtaggaggcagatattaagggatttatgcaaggagttggctttggtgaccatggggtctggccaggcaagtcccgagtccatgagacaggctatcaggaacggctgtgactcacaggcatgggcccaggccactgtcacaggaggaatttgttcttcttcaggggcctttgccggctccaaggcctttccactgatcaggcccacccaggtcatccaggacaacctcctttacttgaagtcagtgattatgggcttaaaccacaactctaacatctctccctgcaatgctcagctgagggactcattgaataacatgactgtggcctcgaaggattcacatatcaagctgatcatcacaattacctgcccagagcaatattaaacaccactcagaaattatgcacatggtttcaaccttctttttaaagtccaagttgttctggacctcccttttggagaggtcccggagtggcgccccgccgcgggtcagtgacttcctccagtggggaggcatctgccctttgtcccacccacaaggcagaatgataggcaggggccgggaccaatccccaccctgtgacttcctttgaggcagcttcaggggtggggctgtccagttcccctgaggtcacattaggaatgccagcaagccctccacgtggctttggctggaatattctggaaaacatgttcatcactgtcagtgggactttcttaagaatcatagaaaattgatgcttcccatggtggagggaaaactcatgaatttgatggtgagattagaggagtttcagactgtaatggctacttttttttacaatttgaaatatttatttagaccaagagaggaaatcactacatgttttgcaatatttacaagttagcaatatcacaaaatgtagtggggaaaaagaacaatttttcttaattacagctctgtaatgcttttttcctacttttcttttggttgtatcacgttgtctcttcatttggcaattttgtaatatcctttcccatagaagaatttaaagataattcagagtatcctctaacgtagttgatggaaatttgctttttagttttgatagtttataggagtttctttcaaattctcaactctttactagcaatataatgtaatttttacgattgctgttaaatttggggaaacctctattgagtttctttccttgctgagctaggatttcagggcatttcagatttgccatggtgtgagttttcttaaatattatttgaattgacaacattcagattattctcagattattctcagaagatgtacactggttaattttatgtgtcaactcgactaggctaagggagacccagacagctggtaagacatgatttctgggtgtgtctgggagggagacgagcagagcatcagagaggagcatctgaatctgtagactgagaaaagatttgctctttcccaagcaagcaggcagcatccaatccatccagggctggagtaaagcaaaaggtagaagaggggaaaattcactgtctcccttgagctgggacgtccaccatctcccgcactcagacgttagaatcccgatgctttatttagcctttggactcagactgggatttacaccattggagcccctgttctcaggccttcgagttggagctggaaccacaccactggcattcctgcttctccagcttgcagtcaatcctggttctgtttttttctggagaactctgaccaatgcacaggtcaacaaagaaaagttcttcctcaaaagcccacactttcatgtttgttatgcatgttatctgttgatttaaaacagatgggcaagatatcctcaaggaatttggagaaatattcttttatccaacccactaatgtaaaaccaactaaagaagctgatggcctttagttttaagaccatttggtgtggaggtcccataaaatgctccagaaaaataacatttagtgtagtgagaaccaggacctgctgtttccagatgagcctaccttttctttggccatttaaagacttccatttccaaatcgtaaaccgatctggaacttgtgtaatatatttgtctagttattggtttgtttatttttaattttaggacttctctactgtcacaggatccttctccttggggtgtcacttttccagccggaaacctctgtgaccaatggtgcctttgcctgagttttgctcgggcctgctgggctcattccacccacccaccctggcaggctgtgctcggtttgcaccaccagtctggatcccaagcctgcaaaaggcgagccaggggcagagtggcgacaggtgtgtgagtgagtgagcgtggggtccaaccactgcacacagctaggcacgccagctgctgcaagacaggcagctaaggttctggcacaggcaccagcttattgtgaggctgcggctagaccaggcatattgcaagcagctgccacgctggctctggggaacatggtggcacccagaagcttggaggtgccaggaaccacacagccccaaagagggtgtcacagccctggcccggggagctcctaggactgggctccccaaagggctgcagctctcctctccttgtctcttctctccttctcatcacccacaacatggtgagcaaagggcatgtctcagcgccaccattcaccaggtcccaagtccttgtcctgtatccaggaagaatgaggtatgacgacaagtagagggtgagcaggacaaagaggtgatttattgagcagcagaacagctcagacagaggagaccgacagtggatagctcctctccacaggcagggtctcctgaacgagtgtccaactctcagcagagaggagactcacagtgggtagcttctctccacaggcagggcgtcctgacatctcttctagtctgactgagtctgggcttttatgggtttcagaagggaggaagtgcatactaatttgtccatgggtggccatgggtgagtctgagaaatgcaccaaaagttctcattccagtccacagaactggcagcccagccccaagtcttcaccggggacccacccctttccacccagaagactgtctgcctccaccaccatcaacctgccatccacagtgcccatggtgcccaagctgctcatgcagaggggtgcccgcaggctggcattgagctgccctaagctcccccttggcctccccttggcacccaacgtccagagggggctgagggcagcagggggctggtgtgtcagcactgcccccaagcacgtgcacacccagctaggtcgcaacagcacctgggctcagcctcaattttcctcagggagcagggagaggccaggcaatgggagcaggtatttctgagcctacggggggagagggacttcctggtcccctgaaaatgcagagatgcctgagtccacagctgcagctgcgcccaggagggcagggcccccacccctctccagctcccactgaccccttggaatgtgcagccctggctgcgcctcccctactgcagcctgcgtcatggcagcagctgctccagacgggccacctctgccatcaccaccatgtacggactttttctataacaccaatggtatttgggggctatttgtttttacttcccttcaaacccatccacgtgaggactgcagttgaggtgcactgcactttctgcactgcgttctgctcagagatgatcttcttggtcttcgtgaactttgcctcaagccacagatgctttttttaaagtgacttacctttgcttcaccaacagagagccccattaagagaggctctgtgtcctctttctcttgttactgtggccctgacagtcacattaggtggctggattctggcttttgtgcccagaagagagcttaccagttcagtaattttgcagtctgtagggcatggtaaccaaacatttgaggaggctctgtgaatttaggggcctttcctggaggagaggcagtttcggggtggcgtggtggacaggcttgttgaatgcaccctagttgataccccttgagggacattatcaaacacccaacttacagatggagaagatgaagttcagaccagtggagaagcatttgcctaaagtccaaagaggagtaggtcacaaatcagaggactgtggtgagggaagggggcgttggaggggggctggtggccaaggctgctcctggaccctgtatggtcgtgggaaagacactccaccctgggaatatggtcagctggacacgtttggctgggaagcactttgaagctgggcagcatccaacatgctggccagtccctggggctcccaaggctggggacacaggcctccactctgacaagctgttcagagcactccccaagcctttgtgtgggaagggacagcccagcagcagagcaactggagtgtagatgagagaggaagaaccacattccagagattttatattttatattggggtgttccacaaagaaagggccctggggtcaaagcaacctgtcccaaggtttttcagcaaatgtcccataagcagcagtgggggctgctccaaagtagatgttctgatccctgctttctgctccgtgcaggaagcagcacagggactgtaggcacatgaggctcaacctgaatcctggctctgcctgttttcccggcctgttttctagctaggtgagaagggagtttgggaagcctgagtttccttttaaagtgggaatataacaggctgggcatgtatggctcaggcctgtaatcccagtacttcaggaggctgaagtgggtggatcgtctgaggtcaggaatttgagaccagcctggccaacatgatgaaaccccgtctctgctgaaaatacaaaaattagctgggcatggtggcatgcacctgtaatcccagctactaggaaggctgatgcaggagaatcgtttgaacccaggaggtagaggttgcagtgagccgagatcacagcattgcactccagcctgggtgacagagcaagactccatctcaaaaaaaataaaataaaataaaatagggatataagcctgccaatctcaacggatgactgcaagctaatatatataaagaactcaacatgctttaaaatcataatgcatgccattgtcattgctgtcacattacagatgaagaatttgtggcaaagcaaggacaagtaaccagcaagagaaatacactttggcaaaatctgattctaatgctgcctgttctcttccacttgccccaaaagaggaggggaaatgactcacctaaggacacacaggaaatatgatgggattagacttggacccagagccttctgaccccaaacccgccactccatggggggctaattctgttgtggataaaaaacgagggagggaaggaggtggccatagaggggaagtgggcagcccacagacccccagagaagacatccttcatccagctctagccacttgtttctgggcagaaatgtgggcccagtgaggtcacagcttaaaagttttccaggagagatcagcaatctggattttcaggacataacctcacttttaaggttgacaactaatttgatgaaaatacatgccacttgcagactgactggccccagccctctggtttgagtcctcatcccctatcctacactgcttaggatctagcaaaccacattctctctatctgtagctcacaccatcacatttgaagagccttagagaaagccaacaaattccagaaaatgcctcttacaaaaaggctgttcatgcagcaattctattcatccatttgcccacccatccattcatccactcatctatccatccatgcatccatccatccatgcatctgtccatcttcccatccatatactcacccatccatccatctatacatacatacatccaagcacccatgcatgcacacattcatctgtctctgcatccatccatccgtgcatctatctatccacccatccatacatctaccacccatccatgcagcaacccaaaaatccatctatttatttctccatccatccatacatctatccattcatggagcacaaaaaacacacctatcatgtggtaagactgggaaaactaaggcccaagttatgtatggcaccttgcttcaaaaatgagtgtgctgtctgccttggatgtgatgcttccacctcgttgtgaggaggaaattgggaaagaacatcagattctcctttgatttcagtctgactaggttgaatctctttggacttctggctgccagtggcccacttagtacccaatgcaagtttgtttgtagcaagcattctgcaggactgggagagaagtcagaatccacccagtcattcagcaaatacccattgagatcctactaggttccaggcaccgtgggagggactggcccagaatgctgcagcagaaaactaactgtatgtccctgtcctctgtatattgacaaaatacaaataataagaaaaatccaatattcatacaatgagtacaataggtactaatattaattattgattaaaactcattgtttctatattttgccatggagtttactacatttctgaatggtaaggctttgtgttaggggatttgttttatatctttgggtactctttattaaaggcatgttaaatcacttgtgaattatttaagagctagacaagctgagtaaaatcagcttgagattttagttttttagtcacagaaaattcaagttctgtctacccatatttttgaaactcattcagtggtacagtttggaaaaggactgtagtaacttccaagagaaacccagatgtgaatgaagtccagctttgaacaaacactccaggccaatacccgacaggtgattggtgactctcttcaacttcccagttgaaacggggctggagtcagacagcaacagactgaaggaaatgtagagatggcctcatccatccccagccctgcgttttgtagacaggaaaactgggttcaagagggaggtgagagaagcccaagtccctccacgtgaccactgggagtccaagaacagaattgaggttcctgcccccaactcagtgctccttcccctgacattgcaaatccatctctctacctccaaaacccaccctgggtccttcacttcccactggctcctggacaaggccagtgtcccctcttctgagcaatggcgccccctgcctagctggccttactgttttccacactcgcccttccaacccatcatctgtgccacaactgatcttttcagaaactaatagattgctttactctcctgattacagtctttcaatgatctcctctcattcttaggatgaagacaaaatcctccaagctcatcttttgccattatcctctctccatgtcgttccccacatgctggcttcagttcagtccccttttgtgcctcaaggtctttgattgaaccatcctccctgcctgaaatccctttcagcccccattgctgacatatttggctcctcctgctttcccaaggtcagcttaagtgtctcctcccctgagagccttcctgcattctccctaaatttacttccttcatcgcattgtcaatatttctggttatgcatttgcttcccttttaaatgttctgttttcttgtagcagaatgtaagccccatgagagcagggctgcacctcatcttccctgttccttctgtattccagtaccagcccaatggccagcatgcagcaggtgctcaataaataaacatcacattactagagaggtacataaataaacagcaactcttgtgtttacagccaatgggcatgaaagagaaagactggggtctagagagaagggagggggaacacagcaggagagctactttcgtttaaggtgacatcgtttcggatgtttgctagttcagcggccatgaaggaacgttccagggcttgacaacttctaaatttctatgactcagtttctggatttgaaaaaacttgccaaatttcgtacaccgcttgatgactctgggagtttaagaccccctttcttaaagtgaggaagaaaatggaaaaggattaaagttcagaagagttgaggcttaggtgaggcagctctttgtacataggtgtttatgtttctctatggaaatgggcatttctattaagcaagactatggatttccttaaaggatatcttaatggtttttaaaaggctggtttattggaaaaagcagaattgagtggaaaagcatgctcttctcccagatgcagttggttagacacttgaagctcaattctataaaattgagccgagcagtgccatttggatgctgcagccttaaggtcaagtgcaccagagaaaatgtgtcagcctcacaaacccaaataaaaatggtataaggcatggctgccattgtccagtctaccaacaggctctcagagagtcagcatttgagaagctccagcaacaatattcgaattctgtgcttctcctctttgtccatagtgagcacttgctgagagccaagcattctgcatacattatctcatcctcaaaaaattatattagctagtattatcattatctttgttttgtaggtaaggaaaccgaacaaagggattctctgtaattaacccaaggtcacactgctgatgagtggtgaagcagggtttaatccaaatttgactgattacttagcctggtgccaggctgcctctggccagaagaactctttgcacatctatgtccctgtgatgcccagagccttgtcaatgtatccaactccttcttcccatagggtgagttctctcttgccagactcctcacttcctgccaacaaaccatgagataggcttggataaatctgatctgcatggaaaggaaggatgtagtgccatcaacactaagagcccaggcaactgaatcaataagagagttaaatctatgagtggttgatcacaatctcatgtcctaattgagaaatcagcaatgtacagaaaaagaccctgcataccacaggacaaaaattataacttatctggagattaacatacaaagtacaggtgaactttatggagaaaatttcaaaactcaaagagcagagtacataaataagagaagtgatgggtcgtgtaggaaaggaagagttaaatgttataaggatgtcaatctccctgtatgtttcaataaatttaatacaaatgaaaaagcaggatttggggtgagaatgagatgaagcaaattgagtctaaaatgtacatgaaaaaacaatagctaaggcaaaattgcaaaaataaaagatatgatatattaaaatacattacaaagtgatcataatttaaattgtttggtctgtcatagaaattaataccttcagcaaacaaaatggaacaaaatggaaagtccaggaacagactcaagaggtagcatcaaaaatcaatgaagaagcaatgtatcatatactaaacaatgttaagaaacttgattcaaagcatagattttaaaaattagatatatactttacatcacatcccaaaataatgaaggattaaagagatttacaggcaaagcaaagctttgaaactataagaaaaaaatgcaggagaattatcattatgacattggagtgggaacaaaattttttaatacagtgcaaaaaagccctcaacatagtagaaaacgaaatttcttagatttgatcacaccaaagttaaatatttttgctcaactaagaacatcacaaaaatagtgataagtgatagattgagagaatgtttgtaatctaaaactaatgaaacttaaatgaaaacatataggaaactcctgcaaaatcagcaagcaaaataaaaggaaacccaagtgagaaaaagacaatcacttctcccagaaggggaagcacaggtatccaataagcaatgtgtggagaggttcaacctctttaataatcagagaaatgaaaattgagacaatatcttagtacttcgtaccccttggaggaacacattttaacactgggaaacattaacattggtttttgtttttgtttttgttttgttgttgttgtttgtggttttgttgttgttgttttgagatggagtctcactctgtcacccaggctgaagggcggtggcacagtctcagctcactgcaacctccacctcccaggttcaagtgattctcccacctcagcctcccgagtagctgggattacaggcacccgccatcatgctcagctaatttttgtatttttagtagagacgggctttcaccatgttggccaggctggtcttgaactcctgacctcaggtgatctacctgcctcggtctcccgaaatgctgggattacaggtgtgagccactgcccctggccaaacattggtcttaatatcacctgctgccatagcaagggggatgggagccctcatgtgctgttggtggcgtaggaactgggccaggtattctcaagaactagctagtgactctaagcatacgcacgccttgggacatgagtggaaaccccagagacagggtttcacaaaatcagaggtaagttcaaggatgtccattgctgcattgtttgcaattgcagaattgtaatcagaaagtacaagatgtgcactgatgaatccacctggtacaagaaaactaaacatctgtcacaggaacaacttaagtcatcaggtacaaacacggagatcagaaaagagtgttcagttattttgaaaaggaggacacagtgtgagataatatggcacaatcattcaagggaattaaatacagccggaatgatcaatacacgtgtcctaagatctaaggagaagagctgtaagtcataacgtatgtcctcagtgtggtgctccctctcccatgttcaatactgagtgtaaactttttttccaattccactcttgtttgctgtaccacaaggtaactcagacagccttggaccaggtccagacaaccagtaggataggatgagtgtgcgctattgatcaaagcaaggagaaggtgcccccagccatcaacaggaagcaaacgtctgggccccacctctccatgtagcaagggcaagcattttgcagcaaaaatagaaacagtgaaatgaaaagcaatgctttttagaaactttctaattttaccatgtttcttttcttttttgagactcattttttttccaaaaaataagctgtaaaatgggccactggaccaaaggctgtatcccttacaaccctgacatacaagggttccatgatctcctactcttacactactgtctctttgacccaataattgaatgtccagcaatctatccttaaaaaacaaaattaaagattaagatttgtgtacatggatgtctaacactacattattaatgatagcaaaattttggaaagtatctcaatatgcaataaaaaagatgagcaaaaaaaattgtgatatcaatatgatgaaatatttctcagccagtaaagctcccagatatagggatgttttaatgactttgaaaaccactcatgtcaatggcaaacacacgataggtggtgacagcagcccaacctgtgtgcaggcaataaaaggtgcattttctgtaaataatttttttaataataaaaccaaccaaacacaggctgctttttattattaccatgagtcagcaattctaaacagtgtcattgacaaaatactcctcaaagcagggatatactgcttccaccaactgtcaccctgtctcggttcatcaccacacatggtatcagactgaatgaaaaaagcaagactcatgttgcacgtggaagcggggtgggtggagggttggggggtcttgggaagatggcaagggtaatggcaacatagatttttaatttccccaaatcccacagagcaactagatagctggaacaagaacccatggacaacatttacagcaaaactgtcacaacttctgaaagatattcccacaaacaccaaaatataagcaggtgagaagaaaccataggcaaccacagagccagttgccatcaacgtctgtgagggggaagcagaggggagccacagggagcccaaaggatctgagacaggagactcgaaaaccaccaacaggagaacggacaggccaatcgagagcagctgtttgagcagaaagtggttttgcccactcaagagtaagtgaatgccagggccttatgggctgagctaaagagggtggagcagtctggccccatgaactcttgaaattaacctgctgggactcccttccaaggtaggagccagattgaggagaaactgcaaggagcagaatcaaatttgaccaggacaggagcagaagagacaaaagaaagagaaagaaagtccatataaagttggggatggggaacagaaccaggaactctcaaagaagaagccgccatgatttttaacagagcatggaaataacagaaaaggaagatctgggagccacacctctttctcaaagattgggaaaaataatctcatgtagaaatgagtaacaaaaaagcaccaagatgaaatcccatgtggattataacacattgacatagactaacaagcagaataacatccccacagaaatgaaagcacgccaactctaaccctgtgtcagaatgagccaaaagataatttaaaaagtgatacaggacagcataactagaattagaaaaactcagagatggcaggagaatggcgtgaacccgggaggcggagcttgcagtgagctgagatcgcaccactgcactccagcctgggtgacagagcgagactccgtctcaaaaaagaaaaagaaagaaaagaaaagaaaggaaaggaaaagaaaagaaaagaaaagaaagaaaaggaaagaaaggaagaaagaaagaaagagaaagaaagagtcagagatgaagtgatagaacttagggaaaaaattgtaattaaggaaaataattattacagaaataaaaactaaactagaaagaaaacatgagcaaataaacacaggaaatgaaagaaaaggtgaaaaaaaattactcagaaagaaagaatttccagtcaagattttgtaaagaaatgaaacaacgtctgatgtgaaaaatatactagatgaaattaacagactagatgctgcaaaaaaaaaaaaaaaaaagttactgaacttgaagccatagtaatgagaaataaccaaagtgaaaagagaggagaaaacagcaaaaacaggagatgaaaaggatttcagaagctgtgacaaatattgaagatggacaaagacgatctgatggacagatcataggagtccctgaggaagaccaccaaaaccaggaaacaggagcaatactaaaaaacagtaattcaagaaaactttgctgaatgcaaggatatttcaatctacatattaaaagagtgatgggactgttttgtgtgtgggggtggctatatgacaatgtcaaactgatagaactttacaatatagagaatgactttccctgtatataaactataccttaatttttaaacatgattttgaaatttacatactgcaagagtacacaatgtagttacctgaaaatatggacctagatagaaggaccatcatcgagtcctattctaaagtaaaattactcagttaaaaaaatccactggacatttaggcaaaagcaataagtgactcataagggaaaagaatattagattatcatcacattttttgacaacaagattttatggcagaagacaatggagtaatatttttaagatattcaaaagaagaaaacatgaatgagagattttaaattccagcaacggaaatttttgtataaagggcgcaaacttttttacatgttagcaacatgcaagaactcaaggaatattgttcctatgagttcttctcaatgaatctactcaagaatgggatccaggcaaccaaaatgactgaggaaacgttgacagaaagattgatgatgagcattaaatatttgcttacttttaaacgaatagtaaaaaagggctaaaagaagagaatatagcatactgtggttatatctgctcagccaatgtggatatagtacatttatacacaggtgtgggacgatatatgcaaagaaatgttaaagtgtcttcagtaattatattgatgatgttagtattctgagactgttgtgggtgttatatgaaaaacaaaaagaataactgtgggatattctgattctatcattacctgtgcccgtgaatatgaagatactcattttaaaaatttttgtcctaaatttgatatttcaatacagaatctccttcctctgagcaccaaaatgccctgaaaccaataaccaacctaatagccatgagcatctgaggctcccagattgtggtgttgaaataccatttcccactgaaagaaaccagggattcttggagaaatggctggtttgaagtccagggcgggaaatgtgtataatgggcccagaactcttgacttgccagagtgtaagaaaacaatctgagtgtactaagctcatatcaaagggaaacagagccaacttggagaagcttccagaaggtgaagatacggcaggttgagcttcaaaaaggatacatttgtaattgattaaaacccatcaggcctggcacggtggctcacgcctgtaatcccagcactttgggaggctgaggcaggcggatcacgaggtcaagagattgagaccatcctggccaacatggtgaaaccctgtttctactaaaactacaaaaattagctgggcatggtggtgcatgcctgtagtcccagctactcctgaggctgaggcaggagaatctcttgaaccggggaggcagaggttgcagtgagccaagatggcaccactgcactccagcctggtgacagagtgagactccgagaaaaaaaaaacattaatatgtttaaatttataatacgtataaaagtaaatctgtggaggatgatagggaatcaactcattattttgaaaattgatgtgtgaagagaaagaatcgagcatttatcttgcttgtctcttgtgagctgtgtcactgggcaatcaaatagtagatgagagggcatgtctctttttaaaaataatctagctattaagtgaaaaaggaatgataaaattagaagatgaccattttgcaacccccaatgaattaatggatctaaacatcgggtatcaatagcctctaacatcagagaaagagagacaggcatcgcgtgcctcttatgaaagaacacgtcatctgtggtcttgccagagggattgaacctgaatttgatcaaacctctagaccagctgccaatctgaagaatacaccaagaacaaaggaacatgttaaactgcacccgcagtctgcaatcagccaacctcagaccatgggaaattctacaggtcaattttcttgggctcttctgtagattctaacaaattatagatgggcaaagagctggggaagtggaggaggaaactgcaggtgaagagagacttgaaaaaaaaacaccttttttaatgggcaagaccaaactataatggctgggaatatacactagagtcataaaaccaaaaagaaacacaagaatgtgattgctgtaaaagtcaggataatcgttacttttggaggagtggggatgggattgggattaagatacctggagggtctttggggatagaaggcaaagttgtctttcttgacccaggtgagactgcaagggtgttccccttatggtaactctttagctatacagttgtttcatgtgggtttcttaatgctttgttttacaataaaaggtttaaaagctacatacacagaattatcttaatggtactgaaaatacatacattgaatgaataaaagacaatatgctacaataggccaggtgctgtggctcacgtctgtaatcccaacactttggaacgttgaggcgagtggatgtcttgagctcaggagtttgaaaccagcctgggcaacatggcgaaaccctgtctctacaaaaaatacaaaaattagccggacttgggtggcgtgtgcctgaagtcccaactacttagggactgaggtgggagaatggtttgtgcccaggaggtcgaggctgcagtgagctgtgatgatgccactgcactcagcctgagcaacaaagcaagaccctgtctcaaaaaaaaaaaaaaatgctgaaaacagtgactgtagtcatctctggggaaaaggattctgaatgactttcactttctcctttgtgtctttccatattttccactgtggtatttctaataggaaaaaaagaagtatgtctattttttacttgtttaatcttaaagcttttaattggatgtcccagaagagaaagatgtctacatttggatttttctgtcttattaaccactatattcccagaacctaaaacagtgactggaatacaaagggcatccatatgtacctatcgaataaagcagccggcatgtgtatccagaacattccaacattccacaaggggagaaataattggcattttttgcctcagtttctttcacaaagcaatagactcattcattaaacctcatcatccccttcccacctgttggcctaaggcccctgggctgcatcctcatggcccctgtaagtgggcagagacattgctgggtataccccactggtgtttcatcaccatggagcctgctggtctggggagaaatacagaggctgcaacctgctctcctacctgagagtcctgggacatgcccctcaaattacgacaaccacccaccagcccctgaagtgagttggaacagaacgccacccagcttgtcacaggtagtataggatttggagatagagcagtgttggattcacaaaaacaggatcctcctaaacacccctccctttaacaaaaacaaaaaagtgctatttaccagtagcaggtgtgttgaggcagaaaaaatcatgagcaacaatacaggatgtcagtacaggaaatgcagggaagactgttctcagagcaccaaaatagactcgaggacatggagcacgaggagaaactggggtctggggggcaacaccaaacaccgggcacagggagtcagcccacccctttggccacggtttcttcagctgccaaatgggtgtgagctgctgcacaggggctgggaggatccagtgaggcagtgctcaaagatggccttggaggccttgggaggaaagtaccccctgggctctgcctgcccacgcttggatccctagaggctggcttggggcatggcacaccgcaggtgctcaatgacaagtgtctttaacccctgctggcttcccgttctctctgacagccaaagtcctcatcatggctctcaggccctgcacccccacgctccccatcatgtcacctctctgacctcacctcctccatgctctcccactcaccccactcctgcccctcagcccccttgctgatcctcaaacacaccacactttctcctaccccagggcctttgcacctgcagactctcctgccccgaacaatctctccccagggtcctcatggcttgtcctcatctactgccttcaggaccaagttcaagggtcccttcctcagttaaaccacaccgaccaccatccttgaccaccctcctccaccccaacacttcttcctaccaatgcttcttcctggcacctggcacttcctggcacctggcacaggtcttgattccactggcacgtgggaggtgcccttccatatttgtttcatatgccaacgtgaacccatgcattcatgacacttattatcacatcgttactactcagctcttggttttcgttagtgcatttcatcttcacttcaacacctcggccagcaaaaggggctgcggacgctcaagactgggccggctccctggcatcattcacctggtagctcacagccagaatccgaactgtggattcaggttggaattgtgtgagcaacaccttgaggccacacaagcagtcagtgagccagggaaaagatggaagcctcctctgtgctgataaattattatttgcattgttctccgaagtggtgaatttcctcttccttggccagcttcatctgaagttcccagctcccaagaagtgtctgaagacttgagagatttttccctgtgaaagcccaccctttgagggtctcaggcagcccagtgttatccagattttaaaaaaacagaatctctttccagcacccctgaaatcccgcctcaccctctgccagggggttgttgagtgaacagttaattgagttcagtcctgttgccttctgcgtggcccctctctcatttttttccagcttgttgagctattaggatgttgaccagctgccactgccagagcttcagttagaaagttggcagcctctggtcttgaaccctgaacaaagaggacggacccagggagggcctgggaagaggacagcagggctgtgggatgcctgaccatcggctctaaaatccccctttgtctcataaaccctgcccttggactgcgggaagttcacggcccttccagaagcgagtgtcacagccagctattaaagacatgtttctgtgagaatggccagggcttggctcccgggggagtgtgggccgcacaggggcttctgcaaagaaaggccattgtcaggagagagcagagagcagccaccaccaacgccgagccctcgggtgcggaagtgattatctgggcacagaagagctggcagatcccgacgccagcgtgggctggccgtgtccagcccccgaggcacaaacaaggacatcaaggaggtcccccagacagcccggccctgaacggagccaagagcagccacagaataatcgctgccatttatgacgcacatggtgtgccaggccaggacatgcgtgaccatttagtcttcccaaaactcctgcacagaagaggcggtgatgcccgagtgaggcgagtgaccttccctggaactgaggccaggcggccagtgagaagggaggcaggacatgcccacactcacctagaagatcctaaccccgcctctgcccttgtttcttccaatccacacaccaccctgcagtcagaggcgccttcctaaaactcaaatctgatcatgcccctgccaggcttagtatccttccgtggctccccagtgctctgggggagaaagtacagtttccttgatgtggcttccaaaggatcttatcacccaccctcacctgccttagcagcctgatgttcaaccacgccccagtgattctcattccttcacgttctctccctctccctccctctctccctcgcctctggtccttccagcatcctagtctctattgcttccatctttctcctagcacttatcagaccatgccgtaagtcctctgtgacgtgttggtatccctacacacccccaccccccaccccacacacacacatgcacacactagattctaaatcccacagggagagcagggaccacatctttcatgtccaccactccttcctgagaggcctgcacggagccaatagcaggtacctgaggcatgtgtgctgatgcggcagtgacgggggctgcttctgaagttcccgttctttcctcaacacctcactgccttcacttgataactcgctgcactgagggcttaactttttccatctaaacttgcagctctgtgactatttggaagttaaatggagagcgggcttggatagttgaggctgactttggggaaggtgatggggtaacgaggtcaccacctgctccctggctgtgggaagagttaatcattatttcacgtcttgtgctttgcaagggaagcaaagccctcagcccagtgggcattgtttggcctgctccatcctccttctgccgggctaagacctgtgacatcagctgctacgggggttgaaggagattctgcattccaaggcccttcgactcagcattcttttctgccaggttaacccactgacccagcactggccttgtccccacggacctgtgatgctgcagggttctcagcctgggcaggcataagaatcaccagcctggggagacccttgagaatgcagactttggggccttgcccctactattgagactcagaggcctcgagtgggacctaggaatctgtgtgtgttccaagcctttcatgggactctcagcatactgtgaaaaacactagccagggtagctgggatgctcctgttcaatatcatgacgtatctaacatttccttgaagtcaaaagcatctttcaacatgtgaagagccatattaataaaaattactgccagcagtgtaccagacatggttattattcatctcatttttgagaaaaacccaacaaggtgatcattgtctccatctcccaggttccttacctgggatcacatggcatgcaaacaccagaccttggatttcagcccaggtgtcacccaccaaggaaattattggaggagctcctcagtgggctcatggcttcctatgagtctagaataaggaccaagccagaacggacaatcaggaatgagactggtagattcttctaggctcagacaaacattaaatgggggagcagaagagggagtgtggacataagccatgctggcagtgggcaggtgccagctccctgtctcagttcccttgtctgtaaaatagaaattgaatcccaactccacagggttgtttgagggttgcaccatgatatggtttggctgtgtccccacccaaatctcacccaaatcgtgaattcccatgtgttgtgggagggacctggtgggaggtaattgaatcataggggtgcgtttttctggtgctgttcttgtgatagtgaataagtctcatgagatctgagtttccctgcagtctctctttgcctgctgccatccacgtaagatgtgacttgctcctccttgccttcttccatgattgtgaggcctccccagccatgtggaactgtaagtccaattaaacctctttcttttgtaaattgcccagtcttgggtatgtctttatcagcagcatgaaaacggaatacacaccatgtataaggaacctggatgcagtaagtgctcaacaaacagtagttattgcaataggagctgatgtggctactattcccaacttctgcaggggttgaaatgtcttagctaaacaaggggattcttttaagctagttaattggctatttaaaacattttcaaaattggccagtaaaaaaattaatctctagttaattatcagctcctatttttctgttttctacctggcaatttttgcaaaacaccctcctctctcctgcttcactctatgatatgctacagttgatccaggttgctttatctcccatttcacatttttgtaaatgtgattatttaactgtgtaaagtgttatgggatatgtttggaatgaaagtcacttttcaaatagaaatgaagttggcatatattgcatttaaatctctagtggggagccgtagggggatgagagagaagtacactcagatatacttgggtttgggcttagagaaatcttctctcctctttcctggctggccaagataatattactaacagaaatctccttgggaaggaaaaagtcctttgatgcttatgatgcaaattgaaaatgcagagggaaatgagagctgagctcctgggctttcccactctgctcctccccagaactgtgaaaaagacaaacacatacttttgcaagttctattgccacatctgaaaagacaagaagaattttgtgttggtggtggaaagagtgacagggatgagccagtccctagtgtacaggcagatgtggggctggggcaaggaaactgatagatttgaaaaatgaagcaagagtgaagatccttttaatcaaagaaaccaacagaggcatggaattgtaactgaccaccaacctgttggatatcaactcttggcaagagggggcagactgggcagctggacatggtttgggaaccctagttacaggggtgaagggttttgctcacttctctccaccaggacaccaaggcagctgccagagcacatggtgcccatgaggaaatgagaaaataggcatctgccccacaccccagggcagaaataggggcacccagctggactgacgtccccttgtgagctatggatgcagacctggatccaccatgcgtgccatgcagggccatgtgccccaggcccccttcaaggaaggactgcccaactgtgggagtgtccttcaaaaggtcaccccttcctggggctgccgggcacagactggggcaggctgggcccgaaggctgggctgggagggcaggatcagctgccggctgagcctcttgccagctggcctcagccacccaccccccggccctcttgctattcctgcttctcccgtccacttcctttgacagctgttggtccctaataatatgtcaggccccaaattccacttcagcagctgcttttgaagagcccgatgacgactccacgttctccctctcagtccagctgagagggacagacatcaatgcagggatcaaagaagtaaattaaatattgcagctgaaatccctgctaaaagagggagctgccccaacccatgagaggatgtcagggcagggtggggccccgggcagcaagtcaggaaggggtgttcctccaggatgagctcctaggatccggggggatggtggggttgcctgggtgaggagaaggcacaggtgcaggctctcggggaggctttggggaggagagggaaggctggcatgggggtagggggcaggaaagtttatgtcatggagctggggagttgccagggtggaccactgtgcagagacgcttgggcaagagcaaaggttttggtcattatcctaagattgacgtgttttaaacctggggtggtcggatcagatttgcattgtaaaaaggtcattcagccctctgggaagtagcacagaggccgtgtggtgctgaaaggggtgttttggactatttgggccacaaggagccccagtccttcctggagaagaaagagccatctgaggagggtgtgcagcagagggaggggttacagccaagagcttttctgcgtccccactgcctgggttgggggcagccttccagcccccggggtgagtgtttcacagaagagctcagctatcaggcttctgcccaaagagagtccatgagggaatattcaccagagtttgtgagtgccaggggcaaagcagtgtgctgtcattgatttttccaaacctgggggccttccgaggcccagaggcaccagcagagtacagacgagtggaggcaaatgcagatgcagtcaccatagccccaggtgccggtgttccccagtggcttattagaaggattcatcaggcagatggaaactgggggagcagagaaggggaaggacggagggcagttgcatttggagctctgggttccagagtctgagggtcaaagcagactaggctctttctggaaaaatacagaagtgaccggcaaggggaaaatggaaaacagcattgtgcattgcagggcctgtcgaccagggtacacaggaaacaacaggtggcttccacaggctgcacctccaggccaacccatttgcaagctcatgacaatggactatcatggctcccattttccaggaggggaaatgatggagaggaaggtaaaaacatcgtgcctcaggcctcacggtgacagaggtgaggccaagattcaaacccaggtctaggggcaccaaagccactgccccagcccccagcccaaaggcaaatgatcccctgagggtgcctcccccaggggcagaagacagggccccagtagcagtcgtggggaggaggaccacgcactaggtaaacagcaggcagtagctaaatgctgagcagtgtgaccgatgttatcattggtaataacttagtacattcatggggcactccatttacaaagtggcttcatgcctactttctcacctctgtgttgctcaactcagtaagggagggagaaagaatgagaatcttaaaataatgacttctgttttcgggaagacagagtatgcatgcctttccctgttcctcttgctaatcacagctaagcctgcacatgaatgttaggcctttggccaaatgccactgaaggccagagttcacaagaacccattgacatggtcctcccaggccagcctcctcccagggcagcaggaggatgaggaaggacggcgagagggtctggacaggccggcagaagctgaacagcccaaatgtcccctgctttctccagaccctacccctcctcgccaggccacacccacagcagcttacacagcactcccaggagagtcaggcatccgtttaatcagtttcataagcacctactgtgtgccaaggatgcttctgggctctaaagatacagaggggaataaaacataaaacatggttcctgttctcatgaaacttggccacggggaagatagaagataaacaactaaacacatagatgagaaagaacagtcagataatacaactgcataagggaacaaagcaagtccatatgggagggatgaggagggacacattagctccaggggccaggcgtctccctgacgagccagaggatgcagcccctgcaggttcctggcagacaggagcacgggacagagggccaggattgggcgtactgagcccactccaatagctgggccactgctaatgtgcgggctcatattagcacctatggtcctagataatgcagagtccagtgccattatttttcatactttgtgcttatttttccggccagaccaggaaagctgtttgacacctacacaatgaggagcaagaaattcagaccttcctcctcctgaggccccatttccttccctctggggttgttgtgaagatgggattcgatcatgaatataacattcactgccgtgagtggaacagttattgaaattgtctaccagtagctttaactagcagcattaatactactattaatcacggaagccagcctttattaagcacttactgtattccaggcactgttctgagtgctttccagagagtaatgcatttcaccctcaccactctggaagggaggtgcaataattatccttgtctcatagatgaggaaactgagacacacaggggagaagtcactttcccagagtcacatagccgccagaccacagagccaagccagcctgacccagcacgtgctgcagaagctgctgctggattttgtctgcacaaaagccccatgggcagataggattcatcttacttcgtgcctcagtggctgaatctataaaacgaaactgaatgacttggccaaagtcaccccagctcagaggtggcagagataggatgggaatccaggccttgactcctcctgcagtgcccaacccccaccacacatgacttctctcacaccttgtacactgcaggtatttggccagtacctgggagacatttctgattttttttccacggcatgtccattttgatcacattttcttctacatgtgggaacaaaactagacacaactttgctgaaagtctgagctagccttacttttacctgcagctgagaaagttagcttcttccctcaccaaggctaaaagggcaagagatgacacacccagcaagaaaaccgaaaataacaaaatcagtcaatgtggaacaaacattactccccggcaactggggccaggtatttatgctgcgatgagacaaaggcagactctttctccttagattttagcacttgcttccaaaacagcagagggccctgcaggggaaccagcggaggatggatggcatctggcattgattggtagccaggctgaataatacatcaagggtctgtgacttcatcacaaaagcctggcgggctggcctcctgcaaaccagactccccagggactgggcctcaccaggtgtcttcaattagaaatacagtgggagcaatgcttctgaaccgattctgaaaggcaggctcccgggctgagagacggagtgaagggacatgctcaaggttccttcccctccatgcctcatagtgggccctgccctggggataagcctcctacagcccctcgtgagctccatccactgccaaagatgagtcaaatagcaagataaggctgcctcctttttttttttttttttgagacagagtcttgctctgtcgcccaggctggagtggagtggtgcaatctcggctcactgcaagccccgcctcccgggttcatgccattctcctgcctcagcctcccaaatagctgggactacaggcgccagccaacacgcctggcttttttttttttttgtatttttagtagagacggggtttcaccatgttagccgggatggtctccatctcctgacctcatgatccactcgcctcagcctcccaaagtgctgggattacaggcgtgagccaccgcgcctggctaattttttttttttttttgtattttcagtagagatggggtttcaccgtgttagccaggatggtctcgatctccaagataaggctgcctcctaagcctcgcatctgttgtctgtaagagagccacggctgtgcaggaaggagggatgaggcggtggagtcctgggtgtcaggtcctgtactacaggccgagcacagggagaggagcaagctttcctccttcccctcctttctttctcccttgaacatttgctgaagtgtcacctatgttccagatgttgtgctaggaagcaaaatacagcaccaaacaagataagcatggtcactgccctgctcccaaggaaggatgctttggaaggcctttcactgaatatctgtcctcacctactctgtgccactcacaggcttggttgaggatcaaactctttttgcagaagaggaaagggagactccaagaggggcaatgctctgtccctagatctgtgaccttgggcaagtggtagtttggactgagcattcctaagctatatccagggcaccccatgcttcctggcctcatgtttagctccttgtgagagggtcaggtcgcccactagcagatgaactccttgctcatccttgtgttccaagcagaaactaacacaaaaccagacaacctggaatgaagacaagaaacccttggcctgctgggtcatgaagctatttctggctgctgtccatggtactggcaagaagcatgaagcctgccaatgtcaggtggttagagccctcttgggaagctaaaagattcttatcgtccaattcatgcttttcacagcctccttggtttttcactgggtctttccaacaagtcttacctgtctcctctctcaactcccggtgagcttttctgttggccagtggatgccttgtattagatgtttgtcttttttttttttttctggtctcctgttattttcccaagtcattcttaaccttggaagcagagaacactcacaaccagctgtacttggtgttgcatattaaataatctttgttttgattcatgtgttaaagtcctttatccattctcttgcattacagagaccccagtcttaacacatatttcttacatcatgtttcccaaatgtcagtcacccacatacctcccacatgatttttgccatactcttacaccacctatcattctatgccaaatatatttcctaaaatcaacccttttaaaagttttagtaggtcttattttttagagcagttttagatttacagaaaaaccgaacagaaagtacagagagttctcatatacctcctccctgcacacattttccctattattaacatcttgcatttgtttggtacatgtggtacacttgatgaaccaagactaatacattatcattaactaatgcctacagttttcttgaaggttcactctgtgttgtaccgttctatgggttaacaaattcatgtcatatatccatcattacagtatcttacagaatagtttcaccaccctaaaaatgctctctgttcactcattcattcctaccccctacccttgaacccctggcaaccactaatatttttattgtctccatagttttgccttcccagaatgtcatagagtcagaatcacatagtatgtagccttttcagactggcttcctccactcacttttttaaaacatacatacatttatttaaaagggaagcttgatataatcatcaaaaatggatattcagattcatttaccatgaataaaaggaaatcatagaagtagcagcaggaatggaaacttctctattccatgaaactcatgacaaaaactggcaaaaattccggaatcaactttttcagaattctggaaattaaccaaaggcttgaagcaatctagattgcatgcattcaggaagaaaggctgaatttcagtaagaacagggagcttcatggcattttaactttccgtatttccatccccttctcttctgctctgagttagccttgaaatcaggttgaaatcagccctgcaatcagggtaaaaaccggtggcctgacagctactgtaggggacaaaacaagattgtagccccttcaaacctcattcccagagaactgttacgacttgacttgtctggtgggtccctggagaactctacttgcaaggttgtcttgccttctgaccaagatcagtggttgccagaggttcaaaggtagggggtaggaatgaatgaagagcattcttagggtcgtgaaactattgtgtaagatactgtaatgatgaataactgacatgtatttgccaacccatagcaagtaaactgtaggtcttacttgaattttgcccactttgaaaagtctaagcatttgctgaaaacaattaaaagtaactgcttagctttctgactgcctaagatggtgagcaacagttgggaaaagtgtgggctaaccaaaaaatttaaaaagaaaaaactggcaaataagatgtccgtaggggctttgcaaagttccaacatattcctgagaatctagaaagccccgtgcatgtgtagggctgtaggcatgctcaggagagacttgagaaggctctgtgctctcaattctgtatgacctgagggtctacgcaagtagaaagtgaaagttagggcagagttgccaatttcctgaccaagtattgaaagtatgcccagcatgcacacagagtactgtggcaaaaattgggagacttattagtccaggcatttgaggaaatgtctgtccactcttgagctccccagtaagctaactgagcagacatttcagtggccacccatgaaaaacaatgtaacacaccatattatagaattaagggggaaaatcacctgatcttttcagtagatacagaaaacgtatctgataaaattgagacaaaatactcctgtcaagacaaaaatacttgtcaagacaaaaatactcaacacactttaaatagtaggaaacttcttcaactggataaagggcacctatgaaaaagtctaagctaatatgatacttaatcgtgaaagactgggtgctttccccataagatcaggaacaagacaaggatgtctacttttgccattgcaattgtactggaggttctagcaagcaattagaccaaaaaaatgaaataaaaggcatctataaggaaagaagtaaagccacctctatttgaagatgacatgatcttgcatatataaaatcctaagaattttgccaataaactatgagagttcatgaacaagttcagaaagattataaggtacaagatcaatatacaaaaatcaattgtactcccacacattagcaatgaacaatccaaaaaatgaatccaataaaataattccacttacaatagcatcagaaaaataaaatacttataaataaatctaacaaaaaagttcaagacatatacatcaaaaactataaaatattacttagagaaaatttttaaaacctaaatagttgctatgttcatggattgaaaggcttaatattgctaaaatggtgataccccccaaattgatatgcagattcaacacaatccctaactttggatttggcagcagtttattagctttaacagctaaagcacgagcctttgaaaaaatagattgtatttcatcaaaattaaaaccttttttgcttcaatggacatgatcaagaaagtgaaaagacaacccacagaatgggagaaaatatttgtaaatcatgtattggattagagtcttgtatccagaatctacaaagaactctttacaaattaacaacaaagtcacccaatcaaaacttgggtaaaggaatcaaatagacatatctctaaagaaaatacacaaagagcatatatatatatactcaacactattagtcattagggaaaagtaaatcaaaatcacaatgagataatacttcacaccacacacattcacacctactgtaattagaaagatgaacaataacaagtgttggtgaggatgtggagaaactgaaacccacataccttgctagtgaaatctaaaaggatgcaggccctttggaaaacagtttgacaatgcctcaaaatgttaaatatagagttaccatacaacacagcaattccactcctaaggtcgctaagagaccttaaaatatatgctcacccaaaaacttgtacatgagtgttcactcacaatagccaagaggtagaaagaacccaattgtacatcatcgatgaatggatttttaaaaagtgtgatctagccattcaatgggacattattcaaccatgtaaagaaatggagcaccgaaacatgccacaacatggatgaaccttaaaaacatgctcagtgaaagaagccaaacacaaaaggccacatattatatgattcatttatatgaaatgtccataataggtaaacccattgagacaggaagtagaaaagtattgacctggagctgggggaaggagaaaatcaagaatgctaatggcgcggagtttcttttagggatgataaagttttggaattgaggtgatggttgcacaaccatgcgaataaactaaaaaccactgaattgtatatacactttaaaaaggtgaattttatatacgtaaattaaatcttagtattttttaaaaggcaatcataaaagtaagtaccttgacaaggaaatatttgccgtattttaaaacataaaatttaaaatgatacaatttttaaaaagaaataagtctaatcattttgtaaaaatatatttctgaaaataagtttatgaatgagaaaggaacactatttactataaatcactcataaaagtttcaaatgtggttttttttaagatgaagttttatgccaactctgtgatttagtgcagctgttaaccagcactgtgaatttcagctcatccatgtatatggtcataaaggacaaaatatacatagccatgacacaggctaaggtagagatgtccaacacaacagtggcttaaaagagaagtgactttctctccctggtaaccatccatggatgataaggcagttctatggtgctgggcaccaaggctccctctgtcttatttttccacccccactagggtgtagccctttctacatggccccaaacaactaaccaccatgtcccctttcctggggaggggggaaaagtagtttagagcaggttccacccctttaaggacctaaccagaaatttgtccacattggttctgctcatgcccattggctaatacatgaccacatggtcactcccagctgcaaggttgcctagcaaatgtagtcttagcccagatggctctgtaaccagctaacattctgctaatgagaaaagagaaaagatatttgtggaggtggtaggggtgaggaacaagtgactgtcactgactcaagcagctctgagtggttggataataacgtttaattgcgatgcagttcgtttacagactgactcagggcaaaccccacctaggtcaaggaattggaaagagtaattggtctatagctagaccattcataggaggactattataagtgaactcagtttcctaataaaaatatgttttaaatagccagtttggtcttgaatttagaatgataatagaagtaatataagtaataatatgtatttttatttatgtgtcagctctcctcagcatcctaaaggacaaatactattattattcccatgtatcataggaggcaactgaggctcagagaggttaagaggcttgtttaaggtcactctacctggtaagtggcaaagtcacactcgaacccagcagcacagcctcacacagagccccggtcagtgaccagcccagtgattccaggaatggatattaacaccaaggtggagaacaggctcctcccagagctgtcctggattaaccccaatggccagggaccatctccgtgtgcatcccacccaagggcaactgcgatagagcctggggctgctttcaagacctatttataaagctcaggtcttccagtggagacaagtggatgcttctgcagctttctaattgttaggaaccaaggagaatgaagtccaaagtgcgctgtctgaggctgcccagtctcctgacatttggtagcttgtgacgtcactgcccaaggtgcccgtcctggggcagcccctttggatcctgcaggagtcatggttcaccagggccaacacatgaccaaatgacttgtttgtcaaggacaggacccttgggcaaaatcagtggtcctcatgaaagaaacattcctaagtcagtgagagacgggttcatgaggctggtttgggacccagagcactgcgtgtgtcccgtggaagacagggcagaaggcactcgctggtggacaggccaggatcctcagccctgtgatccaggaggctaaggagccccagcaccactcagggcttcctgggcttcctaagggcagttagcagttagtttatttactttttaaagatcagtttctctgttagaaactaagtccaaagacagaatcagagacacccacaaggatgtcaatgggaagaaaagagaagaccagagtagagagggagggagggagggagagaggtggaaaacttaatgcccttgggaacccttggggatgcagggataactgaaaagatgtaagggtccctggctctaatatccacaaaccccacccagaggctattttggggtgaacagctgaaggtccttgctaggaaggcacaagcttactaatcgagttcatagcacacacctgccttgggccaagcctgtgctggactctggaggatacagacatgataataacagcagcagcaataataataattataacaaccagcatttgttgagcacctactatgtgccaggtaatagtctaagcactttatacctatcaaagtcctcacacaacgctaccaggcagggatgtatgttatcctcattttacagagagaagagctgaggagcagagcgcagcttgccaaaggctgagaagcagctgagctagggttcaaactgggctccagagcccccactctccccacgaggagatcctccctcagcagttcctatttcagaagcacacagcccagtcagagcaaccagaagcaggtaaatccccttccacagcaccacaggctccgggaaggacacacggcagaggaagcagtgggtcactgcacagagaggcaggctaggaggaggctgaggatagcagggcccccaggcggtctgggaggagtggtagagccacagagaacaaaccagtctgggagtctgagctggcccttaaggaggcatcggggccagacgggaggggccgaggagctgggctttctccaggggagacttccagagaatctgatcaaagctctctctcaagtctcttctctgggtcagggcaactcgcccaggctcagcccagctcgtgggcctccttccaggggcaatgaacttccccaggctcccccgccttttccttaaacaagcccgaagccctccaggctgaggactcctaatcccagcctaatctctgctcctgccagagcatcctgtttgctgtcctcctggctgggttggggcccaggaacaatggtgagaatgagggaacagggagaggcgggtctgcagcctgggggctgaggaaggaggggacatgggcatctgagacagcagcaagggaagcagggcagcgtacagggctgagagcagctgggctgggctgacccccggggaaacaaggcccagagtgaactcaagctgcctgctccaatgctaggctcttcctggtggaactttccatttaccatgttggcttaacctaggaacacagcacatctaaacggatctaaggctcttctccttagacccacatgttagtgcctggctgcgactacacccactgcagagagcaacagtcgtaatgatgacagtggtggtgaccatttatgaagcacttattcagtgcgggtcactgtggttttgcacagtacctcattaaatcatcaacaggaacaaccacaaacaaaagtaatgacaatcccgagagctcatgctggggtcgctcccaacaggccagtgtggctccccatgaattagctcatctacccgcatagcaatctgctaaggcagggacttttgtattcttccttttacactctgggaaaccgaggaacttgccctagagcacactgctggacagagaactgcattcaaagccactgactttgatgacccagttcaggtacttaaccttggcctcggacgcagattgcccaagactcgtaacagcgtccatgggggtcgaggttgcctttataatcagttgcactttccttctattttatgctgtagtttcacaacagtggaaccccagactggaaaactggattcatcaggtgcgtgatctagaaaagaacttgtagaatcacagactagaattcatcgatcaaaaacagctcacagccgcccctctgggatagtaagagctatctcaggaccttcttgcaatgaatcctcagtgtgatcctaggagttagatgctattactatgccctttttaccaatgaggaaactcagcacaggggctaaagtggcttgccagggtcggcttgtaagtagcaggacagacacttggacccagagcccaagtcctgcatcacctcgtggaccctcacctgctgcttcagagccaaaagtaaactacgtagcaaagggcttcctctgagataggggttttcacactgccccctcttgccactctccctagactgtacaagagtctaccatcaccaaagagaaagatcctgtttctgggtctgctttccaaaaggcctgagctatctgacagtcagggcctagacctatggatctgcagcgtcttcagcaccagcacgaggcctggctcatggagactggaaaccaacccaaatgcgtgataggctaacagagcctcaagccgattaagctatgcgcatcttaatctgcatacagtcagtttcctttctctattctttttccatacacggttcttaatccaaaaagatgaagaggtggtggttcttgtttctttcttttttttttttttctttttttttgagatggagtttcactcttgtcgcccaggctggctctcaatggtacaatcttgactcactgcagccttcgcctctcaggttcaagtgatccgagtagctgggattacagacatgcgccaccatgcctggctaattttgtatttttagtagagacaaggtttcgccatgttggccaggctggtctcgaacttctgacctcaggtgatccacctgccccagcctcccaaagtgctgggattacagacatgagccactgtgctgggtcgaggtggtggttcttccaaaaaaacaagtggtgtgtcccattgtcagctgacgcctaagtgaatatgacagcatgagatgctggatgtaaataagatgttggggtgggggaacgtggtgagagatcctactggagagggcttgcctgcctcagtctcagaggtcaccacctgggccagctggtgacaggctgcatccagttccctccctcccactcactgctgaggggcctaaggcaggtgccttaagctctctgaagctgttttctcattcagagcatgggtatagtaatagcattgcaatattgggctgagtgaagctcagataagatcagacatcatttagtgcctactaactgctgttgctgatgtagccatgatgatttttacacctatatttcagcaaatccaagatgccagagctcaagagtccaaatctcacctttcccccatttttgcaaataccgctgtattagaacacagccatgcctattcagtttctcggtgtctgtaccgcttttacactacaatggccggcagagttgagtagttgtgacagagacaatttagttcacaaagcctaaaacatttaccatctggccctttgcagaaaagttttgccaatcctgccatagattgtaagaaatgctgtaattttaagcatcactaggaaagagaaagatttcaccaattaaaccatgacataccagctatgtaaaacaaatccaaatttcagaaatgataaaatgtgaagaaaaagaaaagtgtaccaaaggatcaataaatacactgtcatttgttttcttacaggtgttaattaggtgctgattcccttgtctctcctttcccccaactacatgttcatacctaaaaacctttctaatcttaatgaacacaaaggcaacccagtgtcatggctaatagttcaaatccctgctccacagccatattctagctaagtaaccttgggcaggttaatttacctctcagattcaatttcctcacctggagaacagagataataagagtgcccacctcatgcaggtaaaaggaattagcatggtggttcacaaacagtagccactccacaaaatagtagaaatcagtaatagtaatggtttgaaatatcacttaccttgaccaagctggtttctactgatcccctaaagatccaaaagtccccgtcgggatccccatcacagatcccacctgtggcctgtggtcctagctgctgctctgcttctgggccagagaaaacactctgtattagtctgctctcatgctgctaataaagacatacccgagactgagtaatttacaaaggaaagaggtctaatggactcacagttccatatcgctagggagacctcacaatcacggtggaagacgaaggaagagcaaagggacgtcttacatggtggccagcaagggagcttgtgcaggagagctcctgtttatgtaaccatcaaatcttacgagacttattcactaccacaagaacagtatgggggaaactgcctccatgattcagttatctccacctgcccccacccttcacacctggggattattccgcttcaaggtgagatctgggtgggaacacagccaaaccctatcacactccaagatcgccctgtcccgggagccatcactgctgttctggttcctccgtcatcctccaacccaccttggtctggaccagctggtctcagccatgcacagcaggctaccaggatggtgattctgggagaaagctggtttcctgaatcacaggggactctttgtctttctgatttagattcctgtctctttgcctccctttaccagaggaagggtgggtgaagtgtgagcttggtgacactgtgaaggtggcctcatccctcctgggaagaccctagtggtggaggccatggaaaagcaggaaagggcacaccacagagccccagggcaggcaaacggaaggcccttctgtgcagccaaatgtcattcagccaacacctctgagaagcttctgtgaaactcctggaaactgcaaaggacttccaggcagggcagcacagtgagctcatccttcagcatgctccctgtgctgcaaacacacggcctcaattaaatatcaaaatggaaaagcaagcttccaggtccagccctcatggtgtaagggtagtagacttactctctcagcataaacaatgaaagaactaggtatttatatgaagcaactgctgccaacacacagcttagagctgtgatccctgagagaagttttcacataggcaaaccccacactcactcaggctctcccacggggggatcttggcaaactctggtataagaaagtggagcccaaacagaacagttctctcactgggcagaggaaactggagttgacatttggggccctgagacagctggagtttgcagggcagagaacttcagaggatgtagttgcacaaaggagctccagaaatctacacaagggactccttcagtgtttggctgaatactgagctgcctatgcacggggcacatttctgtgaggccagcatggaacaggtaatggggagctggggcacaggtgggaagtggaggttctggaggttgtgcagtgctaagggacattagagctcagaccagccagagtggagacgtcatcgaacacccttagtcagtggacagcccacacaatccatttctgcagtagagtacagggtactctatgcctaccccaagaaaacttaaaatcaagccaatagtgactcaagctgatcccccaggaaattaactccttgtcataataaagcctgatgctctttaaaaaggaaaagaccaaaaaaatctagactctcaacaatatacagcgtataggaaaaatctgttagatacactgtctgggattaatggcagattaggcaacacagaacaaagaaaatcagtgagcttgaaatcataacaatataaactaaccaaaaaggaccacacaaagaaacataaatgaaaaagaaaatgagcagagtgtcagttacttctgagacaaattcaggtggcctaaaatttgtataattggaatatccaaagaaagaggggaagagaaaaaatatttgaaaaaaaattggttgaatttttttcaaatctgatgaaaaatataaaccctcagaactaaaagttcaaccaacaccaagcccaagaaatgtgaagaaaactacaagacacctcatgattaaataacataaaacaagtgataaataaaaaatcttaagagcagccacaagaatacagcaccttccataaagaagaataaacataaagatgacagaagccaaaggacagtggagcaacatctttacagcactggaagaagaataaataaaacacagaattctatacccagaaaaaatatattgcacaggcaaagggatctaatgctttcttcagacatacaaatgctgaaagaatgtatcaccaacacatccacagtgcaacgaatgttaaagaaagtccctcaggtggaaggaaagcaataccagacagaaatccaaatccacacaaaggagtgaagagcaccaaaaatggtaactatgtggataaataagaacatttttatttttcaaacttctttttaaaataactgaatgtttaaagtaatacaataccaatgtattatggagttgattatatatgtatatcatatatacatatattgatgatatatattacaatatatatatgtaaggtgtattacagtaatacttcaaataccaggaggaaagaaatgaaagtaaatttcaagttgttatactatatgtagagtgatatcattttacctgaagtcagactgtgatgagtagaagatatatgctataaatgctaaggcaattactaaaataacaaacagtaatggattaaaaagccaacaaaggagataaatgatatagtaaaaaacaatctaaaagaaggcagaaaaggaagaaagggggaacaaagaacagataagaaatagaaaacaaattgcaaggtgataaatttaaactcaaatatattaatatcacattaactttaaattgtctaaacaccccagttaaaaggcagagattgccagattggattattattcaagccccaactataagctgacactaagcaaccccctttaaatataaagacacaatagattaaaagtaaaaggatgaggaaagatatatgatgcaaacaataatcaaaagaacactggaatggctatgttagcaatagatggggtcaggcacagtgcctcacacctgtcatcccaacaatttagcagcctgaggcaggaggattgcttgagcctaggagtttgagaacagcctgggcaacaaagcaagaccccatcttcacaaaatatgtaaatattagctgggcgtggtggtgcgtgcctgtagtcccaactacttgggaggccaaggtaggaagatcacttgtacctaggagttcaaggctgcagggagctattatcttgccactgcactccaacctgggtgacagagggagaccctctctctaaaatatatgtgtgtgtgtttgtgtatatatatatgtatatgtgtatatatatgtatatgtatatgtatatgacaaagttcattttagagcaaagaatattaccaaagatagagttgatttttaacaatagaagagatcaattcattaggaagacataatgatcctaagtgtttaggcacttaataacagagcttcaaatacatgaagcaaaatcttataaaactgcaaagagaaatcaacaaatacacaggtatagtcataaatgtcaatacccctctctcaacgaataaatagaatatcagtagggaaatagaaaacttgattaactatataactatcaaccaacttaacctaattgatatttatataacactctagccaacaacatcaaattgcatgttatttctaactggtctcaaaatatttaccaagatagaacatactaaaccaaatatgtctcaataaattttaaaaaattcaagtcatgaaaactatgttctgtgaccacaatggaactaaactagaaactggtaacagaaagatacctagaaaatcacaaattatttggcaacttaattaaacacttttaaaaacctagaaattaaaaggagaaatcaaaatggaaattagaaagtatgttgaactgcattaaaatttaaaaacaatgtatcaaaatttgtaggatacagccaaagaagtgcatagagagaaattcacagcattaaatgtgtgtgtaagaaaggaagaaagttcctaaatcaatgacttcagcctccaccttaagaaagtaaggggaaaaaagagaaaattaacactacagtaagcagagaaaaggaaataataaagctagggacaaaaatcaatgaaacagaaaacagaaaaaatcaatcaacaaaaatgaaaacaaaaactggatctttgaaagatcaaaaaaaaagcaaaagacctgtagccagattgagcaggaaaaaaaaaaaagaatacatgaattacaaatgtctgaaattagaaggacacatgagacaaatgagaaattctatagattatttaaaaaataataagagaatagaataaacaacttcatgccaatgaatttgagaatttaaatgaaataacaaagttgttgaaaaatcaaaactatcaaagttcaagctacaagaaataacctgaatagccctctatctattaaagaaatggagtttgcagttataaaccttatcacaaaaaaaaacttcaggtccattcactggtgaattgttccaaacatttaagggaaaaaaatttccaattctatcatattcttccaagacagtgaggaggatgaaatactctccaacagcctttatgaggccagcatgacatctgaaaacaaaaccaaagacattaccgagaaaaggaagatcaatattttttcattgatgaaaaaatcctaagcaaaatgttggcaaaccaaacccaacaatatataaaagagtctatgttaggaaatgtagagtttatccaaggaatgcagggttggtttaacattcaaaaatctatcaatgtaattcgacatattcacattctgaaaaagaaaaaaacaaacaaacatgtaatcatttcaacagaggcaaaaaatccaacaatcatttctgatgttttaaaaaactctcatcaaactaggaataaaagagaatttcttctacatgataaaggcatctacggaaaatgtattactaacaacatagttaatggtagaagactgactactctaccccaaagatcaggaacaaagcaaagatgtgtgatctcactttgtactgtattcaactttgtactgaaagttctagctagtgcaataaggcaagaaaagtaataaaaggcacacagatagaaaagaaagaagtaaatttgtctttttttctcagattatatgattgcataagtagaaaatactaaggaatccaccgaaaaaaagctagaaagagagtatctggcaatttcaaaagatgcaaagtaaatacagaaaaatcaattgcatttggacatgctaggagtggacaattacaatagtggcaaaaatatgaactacttaatggtcagttgaataaaagatgggcaggacctatcaacttaaatatacaaaatattgtagtagaaattaaagacctaaataaatagaaaaatataggtgttcatggattgaaagacgagataatgttaagctttcaattctccccaagttgatccgtagattcaatgcaatacaattcttttattttaagtgtttgtttgtttgtttgtttgtttgtttgtttttgaaacagagtctctccttctgtcacgcaggctggagtacagtggcgcaatctcagctcacagcaaacccagttttctgagtagctgggattacaggcgtgcgcccccacacccgactaatttttgtacttttagtagaaatagggtttcgctatgttggccaggctggtctcgaactcctggcctcaagtgatccacctgccttggcctcctaaagtgctgggattataggcgtgagccaccgcaccatgccaattcaaaaaaattttaatcaaaatcctagcaggcttcttgtagaaatgagcaagctaattccaaagttcatatggtaatacaaaggagctagaacagtcaaaacaactttaaagaaaatgaagaacaaagttggtggactgacactaccagatttcaaaatttactagaaagctgcagtattcaagacagtatggtattggtataagattagataagcaggtcaatagaataaagtcaaaaaataaacctttaattatagagtcaattgacttttcccagtggtgccagggtcatgtaatgggacacttgcacgcccctgagaatgagcacctccttacatctaagctcctgggggtctcacttgtctcaacctagccccagtcctgctactgtgggatcttgtaagttacggtggatgaaaactcttactctcttcagggtgcatcagattgacatctcaccaaattggttaaacactcttggaagactgaggtgccatctcccacgtcttgttccacagttggggatcggttgacaccaacactgaattattttatgtcccccaaacacacacacatgcagcctttaggccttgcctccgtggcctcttctgagaaatgggaccagtaaaatggtcccctcttttctcaggctgcccaagagcccattggcagttttcaatctctagaaagagactcagcctccccctggaaaagtgcccaatcccacaggctgggaaaatgcctttgattcctcaagcagcctcaagtagcagatgttgtcatggccccagtgcttggcccatctcagaggtgcagctccaggctgccacaggagacagtcactgccccctacagcatcctaccccaagcacctgcactctctgcctgagtggagtgaactatgcctcaatgccatagcctctggacccttctagagagcagcccacattctcttggacggaccccagaaggactgcactccagctgcccccagcatcgttatctccgtgcgttgtttttccctgtctcttccttcccggctcctcaccatgcttcctggatcccatcccagataaactacttgtatctgaagtttatctcaggtctgctagtgggggcacccaagctaagacacaagtttcactagcatatttgggtattcctagagaattgcaactcatcaaagctgagggctgatttgctcattaatatgggcatctactctaaattgacacaagctgcgaacgtctcacaggtttgttgagctgtaaagtggacagtgtagcagcaaccaggagaaacctgaatccagatgaagcgatgtgaccaggagaaccacagtgccattgcagtggctggatttgatctttatgaagtcatagtgatccctgttgtggaacccaggtggggacattcaataaaatccatcctcgtgccacagtattcacccatttcctgaaaatgttcttttaaaagtgaaacaaatgagcaaaaagcaaccaccaaaaatattagtgatgctttacatacttgcaattcaaacagtggccccagaccagccacattcccttcacctgggagcttgttagaattgtcccacccagacctgctgaatcagactttgcttttacacaagatccaggtgactcaggggcacatcacagtttagaaagtgctgctctaagggatgttggctttgcagaacagggcagttaatctacaggttctggggttgaatcctggctccatcgcttactagctctgtggcttgcggccagtcccttaacctctctgggcctcagtttcctcattggttaggtgcctaccccctagagctgctatgagacttcaatgcaatcatcaatataaattgtttaacacaatacctggcatgtactaagtgtacacacattttagctcttagcctggtcatccctgcagcatgatgagtaagcagtcctggttttctgaacagtacttgaaaggttgtataataataaaatattttggatgtggagtgagtcaagggtgagatttctcatctcagctctatttagtgccaaaaaagtaactcctgcggctgagcctctgttccctagccagaaaatgaaagagaatcctttccacctgcagttcccattcctgaatgcacacggtcatcacctggggagctggcagcatcctgacacctggctccaccccctgagatcctgatgtcacggcctagggtagagcctaggcacctcccagagattgtcatgatcaaccaatgttgagcacgacctccttgggcttgtcatgctgtggccacctcccattataagaactcaggatacagtaaaaacccataggagttttgaatctgcaggatcgtttttcaaagtgtgcactaacaccctgatttatcttttatgcaaactaaattccatacactaaatcctgatctatgtgcccagttgtaatgtttatctctatcccactggcaaatcacatttttgtcagcacggagctcattacacatggacttgctatctactgctctgctccttttagatggcctttgttctgctttaaaaaaaaaagaagtcctgttagtttttccttgggatgaactgctaaaatatccccaaatcctttaagaaagtcaggggagcagccaggcgcagtggctcgtgtctattatcccagcactttgggagtccgaggcaggtggatcatttgaggtcaagagtttgagaccagcctgactaacatggtgaaaacccatctctactaaaaatacaaaaattagctgggtgtggttgcaggcacctgtaatcccatctactcaggaggctaaggcaggagcaccactcgaacctgggaggcagaggttgcagtgagctgagatcgggccactgcactccagcctgggcaataagtgagaccctgtctcaaaaaaaaaaaaagttgggggggcataaatcttaggagaatgtaactatacaatgtaataattcatcagcagagtatgtgaatcaattgtggaaaagaataagaccatgtcccaagtaaatggacttgcatatgtaacttaccaccacagtttgatcaatgtggctgcctccaagttttctggctgctgaaggaactaagacgattcttaatggactcttgctacaataccaccagcgagtggaagaccaacatgttgaaggaagggctggaggaggtgattccccagcaccagagcaagcccctttcaaaactgcaatgcccgtccctggcctgatagctttaccttcactcaggcccttccttcacctcctaaggactttccagctcccctaataaccagaactgccagatttattgagcaagtttattttctattttttgagtgaatatatttacttatttattgagcaaatgaaaatacaggatgcccagtgaaatctgaatttcaaatgaacaatgatttttagtataaatatggcccatgaaatatttggaacatacttatactaaaaaaagtttttttgctgttgatctgaaaattcaaagttaggtggacatcctgtattttatcctgaaactctcctcataaccatcacgcccccagtatagacaaaattcttcaacaacagtctcagcaaggaataaacatgaaatagggatgtctttccaatcacatggctctttcaagtcttctttccttatctgaagcagaagttgcgggttgcttctgaatttctggcctttatttttaatttggaaacagagccccattgaccattgccattcagctagaagttgtgctctccagggttcccgacagctaggtcttctggaaatgagactgaattataaccagtgggataggggagggagtgttggggtatgcctgggaatacttctttaatggggggtcttctctttcttcatcctactgctaagaatatagctatgatgactggagcaacagcagccacattggactgtgagaacacagttcacatcagtgtagaaagctggaagtaaccgagtccctagtagcttcctggagcagaactaccatatcagccctggatgcctccctccagatatttttcacatgaaagaaaagtcaactttttttttttttttttttgagatggggtctcactctgtcacccaggttggagtgcagtggcgtgatctcagctcactgtaatctctgcttcccaggctcaagctaacctcccacctcagcctcctgagaagctgggaccacaggcacacaccaccacacccagctaatttgttgcagttttggtagagatggagtttcaccatgttacccaggctgatctcaaattcctgagctcaggggattcgcccacctcagtctcccaaagtgttgccatgagccaccacatctggccaaagtcaacttttgtttcagccaacgatgtttgtgggttttctagctttgtagccaagccaagagataccatccattaatgacatcttgcagattccatcactttctggtcacaatttggggagtccagttgaaaatgcaatctcatattccattggaatcttatgtcctcccttccaccaggcttggtcatgtttgaggctcatgaggcttgatggggaggaagataagatagccataagaaatatcaggaaaaggagatggaagcattgaaggatgctggccagaggaagatgaatccatccagacaggggatcccaggagctttgggaggcaaaggcccttgagaaactagagcacaattctcatgggtggaaaccgtgtagtgtggggcagtaccccccacccccgttgaaggggtgagtagaggcaacaaggtgtgtgcttgcataatacgttgtgtctcttagttatttggatgtggaactcagagactccagtctaaagctttgcccagagagagactctccctcaaccttccagtaaattccccttcggaggtcagcctctgctacttgcaaacctaagaaccatggttaaggtgctctgacatcgtggttaagtcactaagcttcttaaggcctgatctcttcatcagtagataggaaaggcagcccagggtctactctccctgcattcactgtttctactgtgcattcagcatcatgccagacaggtgctgcttcctacagggctcaaagcaccttgaaaacatcatcagcgtggttaggaattcgaggctgcatgtgtacactgctttaatattacctctcatcattgcttctcctaagggccattgaatctctagcacacagggacccttggagtcagtttcattagagaaagagccaggttaattccagcccagcgaggaggctctgaatcaaacagccgcctcttccctccagagcttcttcaggctgacccccaggcgcctttctatcaggggaaagattggacagcccggcagttatcgacagagacggccgacggacattgattgggactgcactgcgagtctctttcatttccaagtaccagctatgagagagtgatggacgtgtcctggtgagattctgagtctcctggagctgagtgatacagagactcatgagcaagtcctgcctgtctgcccagggcagggacgccatcagccccaatgagttgctgacctttagaagaaaaatcatcataagctcagcagcagcccctgattgaaggatctgcaatcatgaaaatgtaaaagttaaatgacttccaaggagagcgactgcattccctgcagcacaaatgttctaccccaactcgatgctctccgtcccctgccccaccagggatggtatctggtctcctggaagttcacagccctggcctccctgcctgctgaacctcccacccctgtccatccgaaacactaaccaggggagagcaggtccagagaagggaaatcaggggactcacaccaaaagaaatgagagtagatgacgaagcagaacctccacgcccaccgcaccatggcctgtggacttagtatggccttcaagaccctccctgaaggagcagctgccagcatctcaagtatgctgcccatcgaaactgtcacatttcacagtatgcctcctccaccccctcggacacagactgcatatctctgtgtcctcagtgccaccctgagacctcactcatagcaggtatccagtgagccctccagaaagggctgggcaccacatggccaggtggcttcagcaaagctctcaagctgtggatgccttctccaggcatggccctctggaggcacgctccactcttcctggctccttcagtcactttccaatcctcccgtgggctcagacatgcttttaagcaaagatccctgactctcccattaaggagtccaaagaaggacagatcgacgttctctctgacagccagagtcccctggcagggagaacggatttgggaatggggtcacagacaacccacaccccctcccatggcccagtctttttgtctctcatgccaccatcctctccgctggggaggggccaatggcgatcagattcgtggatcaatgtgatgcatctgtctcctgatctcctgacctgtctgcttggttttaagggttttgtcctttcttttgccttttattgtaaagcctcaaactccttttgaaaaaaaaggcaggagcataaatattacataagtttaaacaagatataaatatgtaattgactgtgaagggctgagtggaatgtttcccaacacgcaggtcctgctgtgcccaggatggagtgggggaccagccctttcaccggggcctgtccactccaagaggggatggaaacggaagcgtgcaggctgagctggaccgtgagcatcacaagcagagctgtgtgcttctgtgcaccactgcgagcccagcactgcacagcggagctcaccaaacactgaatgaatgaatgaatgaatgaatgaatgaatgaatgaatgaatgaatgcatgcatgaatgaactgcttcatccttctgcatgttctccattcagatagggtttccagagagcagctagagattgggaaactggagatgtcatgcgctgaagcctatttaatcaggtcttctatgtcctggaggtgctcgggggtggaaaagggacaacttccaagggaaacagcgttgggaacgtgcccaccatggaacaaaagcttcctgcaccccctgaggaatcagcaccctgcctggtgccctgtgcatttcctgcgctgttttctccacacttccactgccaccagcctggcttgggccatcattactccagcctctccccctgcactccactgtcccttctccagttcacagccagaatgatgcttttaacatgggaatctgagcctgttgccacacagcccaagaacccttcccttctgagcctgcaagcctgcatgacctggcccagccccaagaatctcattgctcccttttcctccctcttgctcccccaacaaaaacccttctcaggacccttgcccttgaggtgcctttgcctggatggctcttctccaaaacagtctcccagctcctctctccctcactttcttccaaccctgctcaaatgccacctcctctaagcagtcctccctgactgctcaggcaaaacaccaccaccaccaccaccaccaccagactcacaactctccacccccttacctggtcttacctttctttatagcacctttctctgcctgacagccatcgcactgtgcgtagattcatttattcacttcttgttcacctctcttatttaaaagagagcattgtgagaacagggaccatgtccatctagctcaccactaaaccccagtgtccaacacataggaacatggcaatcaatatttgttgactaaattaactcccatctaagagatgaagtgaccgggacttggagaggtgaaaaacaccttcggaagatgagcgtagaccctggctcttccccttacctgcgggggtcagattctttcccaagtcaagacaatggtgactgccatgcagactctgagaccctgacccaggcaatgctcagagaatgacttcgcacaggtttattatgtttggcaagagataattaaccgtgtcccttgtatcaacagccttggataaagagtggccccagctctgcaagcacccaggcagttttgcaaaccagattattacttcatataaatatttaatgaggcttgccctctaggtctcccttcctggtccatgatcattaaatataatcttgcagccaaaattcaaactcagctgtcttgggtgggaggagggagagttcaaacctactgaagaccctggttaactttaaactcaatagcagatgaaggggaaaacagcacagaaggggggaaaagggaggtagggagggaagaagagaggcatgacaggccaatatttctaaaaagccccattggacactgtagtgtagcaaatggtgtcccccaaaattcgtgtctactggaacctcagaatgtgatgtcgtctggaaatcgggtcttttcagatgtcattagttaaaatgaggtcatacaggattagggtagatcctaaatccaatgactgatgtccttattgaaaaaaaaaaaaaaaaaaaaggagagaagccagaaggccacgtagagacagcagtgttgcagccacaagccaagggccacctggaaccaccagatgctggaagagacaaggaaagacccttccctagctcttctggagggggcacggctctgtgtataccttgattttgaacctctggcctccagaactctgagataatatattcctgctgttctaaaccagccagtttgcagtaatttgtcacagcagcccccaggagattcatacaggctctctggaattttctccagggcactccccacccccagagcctctccaccagagctaagtgagggccaggaatgggagcatgtggtggtttttgagcaggaggcccaggctctgtggctgtgccctgagctgcctcagtctccccagccacccctcggctagcttggccctccagagccagctgaccctctgggggctctcagggccctggctccatgtcacctctttgctttcccttcctctcaaagtcctcttcttgaaataccaacacgtgagcttccaatgatgcttcttgggctggaatcaggccgcactgcaggtacactgagggcccaccatgtggggtcaagagtcaaattcagggagaccctgtacacagcagggccatccgtatctctgactgccccctgcaactccccgtgttccttctcacttctcacccccgcgatgagaggcctcatccaggacagcctgagcagcccagcacccagcagggaggttggctgcaggcaggggtgagggcctgggtccgcactgtgctgcccacatctactgtgcccaggagcaccccaggcccccgcccaggtgcaggctttgtcgcaggaggcatgtggggcctgaggtcctgcgttgcaggcaagctctctagtgacgtaagacatgcttggcaggacagctcgggagaggcctctctgtgccttcatccctggccagctggtcttcctgaagggaccacatgctccaagggcggtggtgaataaatataccctaaaaggtcgagagacaacctccacgtgcacaggctttaacttggatttactcaaatagggaagcctgtttcttctctagcaaaggacagagccacagtgcaaacagcctaaaagataaatgagcatggacactctcaacagcaagaagaggacaggcaggtgggggagagggagagcagcagtgcgtctggtggacctgcatgactccaaccagtatcaccaaaagcacttccagactaatccataggtgagcaaatctgaagaatctatcatctatctccccaaaagagagaaaaactaacattagttgggcacatactataagctgtcatcctccattgactcatttcatacctacgagcaccctctgagatgcatgcttgaatctccatcgtacagactgggagatggaagttcagagaggttaagtgacttgcccaaggtcacagagcccacaagtggcaggattgacagttctgtttctttctttctattacatcacaggttttgagagccgaccagcttccagggatcatctcccacctggaatgaagttaagagaacaggcaggaaagggaagacagggtgaactggccaagaaatccctaattgtgtaaattaccagacaaagctcttcagccccttcctcatgactcagacatggagacaaaggacaaatgaaagggaggaaatgtctttgcctccctggaaaggaaggagacccaccaagcagaaagagagggaggagggaagggacagctcagtggagctgcagtgaccaagcggagtacagcggggagaaatccggagacatttcccagtcttgccagaaattcccaatcccatgcattttctcctgcaggggaggaaagggggtcactgcttccccttcccgtactctgcaaggtttaggtccaattgggtctcacagaacttgatggcagggggagtggtggggagcagtcacggcacccctgcagagaaacagcttgggaaactatgccaaactctgaccttgggggtaagccccgcctgtgtgactcagttctctcatcctttttggagtagcctggtggagagccagaccaaggctgaccacgctccaggctctggactcagaactggggctgacatagccagcacttcctgcctgtgtggccttgagaactcagctcagtccctccatgccttggtctccccattgttgggaggaggtggcaacacccttgcctgatcgtagcactgtgaacctcgagcctgaggcttctttgagccctgagcatccagtactcggcaaggacttccgttggtggcattcttacttcctccccgtcgctttagagggaactcattcatccccagctgaagtgtaaaaaccgactttgcccaaacctaaagaagtgaaagtggacaaacaaggagtggcccccaaagggaccttcccttccagataggagcttccattcaagacactgtccactccccactgctggagaaccccagcccgggggtgcccagggcccccttaaacaagaattatcctccagaggcgtaatgctcgacaaataaatggctcaaacacttcctattttaccccaaaagacagttaccaccagaatagacccaaactgtgagctccagaagaacagaaaatgtgcccatcgttccctctgtgaattgccagcagctattagcacaagcgtctggcgcctgggatgcccttggtaggaggggcttgaatttaggaaaaagtgaatgttagggctcagctcaggaagtcccaggagatcataaaaagcagatgatcatgctctctccgggaggcggagcttgcagtgagccgagatcgcgccactgcactccagcctgggcaacggagcgagactccatctcacaaaaaaaaaaaaaaaaaaaaaaaaagaggggggtattcccaaatgctccagccctgatcgttcctgacagctatggaaggagcacagaccagccagggccagaaccttggtttccaagggcaaaccctcctcattaattccatcccttcaatggaactgcactttatctcctcctgcagaaaggaatccatctcgatgtcaatcagcgtggcgctcgcttccgacggactcacagcgcagctgagaaagctggtccgatgctccgttaatgcggcactttaataacaatatcactcagatctcaaactgcttaattagatttcactcattgtcatcactcgcctcatttgaactgctcgtttataatttatggtctttatgcatttggttgttcatttgtaaaatgggagaaaacaatcacagggcaaaaagcaaagcttaagaaatggatttgacttttcccaagggctggtgtgctgcagggctgagcagcaaggtcaaaggaggaggatgctggatgtgtggttgtttactgttcctgcctgctcagtgtccttcgtcccttctcctggtaagagctcctggggtttcccccagataaggatcctccccagctccaggcctttgtggttggttgagccattcttccaccttcagaaggcatctgccagcagcagcctccaccatcagcttgttctgactccagtggactcagtgattgtttcaaaaataggcacctgacccaaagcagtccaatgacagtgagccctaaacatttgctgtaattacaaacctgcatgactccaaacagcaggtgaaggggaaaacagcagagaaaggaagaaggtccctccttcccttggaacttccaaggggtccgagggaaagtcattcccttgggaatgatccagttggacgtaaaccttgcagagtgcggtgagggggagcagtgactccctttcctcccctacagctggggaagagtcctgcctcttgctggtggaatttcagtctgtacagtgtgggggccagcctccctcccacagctgggtggggtgagctggctgagaaccagcttgaggaagcagaacaagggaattcctggcgacatttctgagcacctggacttagttatgcctgaatccaggggtgctggatacttaaattttgtgagtcaacatgttcccttgtttctttcagcctatttgagctgaatttctttcaccagcaatggaaagacattcaactgacaagatgtgatgtcagagatcaccttcatgagaaacaccatagtcactgattcttctacaaacccaatttgcgatgcatttctaaacattaaaaccgtgaatagtgctagagtgatatcaaagatgccattttgaattcatagagaagagtggggtttcctctggccaccttaccccacatttcaacatcaccccagccccaccatgacataacacattcccttgccctactttttttttctccttggtttttatgctcgaacatactaaatatcttactcatttgttttttgtatgatctgtctctctccactacaaaatcagctccctgaggacaggagtttttctatgttttgttcactgatatgtccccatgtcagtggaactgagacatagtagtccttcagtggacatttgttgtctgattgagtaaatcaagctgttgtaggaactacattcagccactagtaagagatggaaggcaagcaatgtgggagtttctttctcttatacgtcaatctggagggttcggagctggtgtggagacgcatggtgttctctggaacccaagtgccttctgtcctgctgtcgccctgtcctcagcacacagattccctcctcaaggtcttctcatggtccaagatggctgctgttgctccagccacatcatccgcattccatgcaagaaaaggggataaagagaccctctcaaatgctttccctgaagagaaaacaactgctaccttcgcttcattggccaccccagctgcaaaagaggctgggaaatgacatcttttagataggcacattgccatcccaataagatcaatgttctactactaaagcagaaggatggagatggaacttggaaagcaactagaaatctttgttgggggcaaaaagaagccatgtaaatgagaaaatgatagtactatagagaagaaaactacacagccattaacaatcaggtttttagaaaactctgactaatgctagagaatacctatgatacaatgtcacatgaaaaaggtggactctaaaactacggaagacctctatttttgtaaacacacttcccaaccacacacacacacacaccaaagacttgaaagaaatataccaccacattcatagcattttcctctaattaggcagttacaggtggcttttattttccttttatgctttttttcccagaggttttcgacaaatatatgttgcttaaaaaaaattttttttgaggagtctcgctctgtagcccaggctggagtgcagtggcatgatctcagctctctgcaatctctgcctcccgggttcaagcgattctcctgcctcagcctcccaagtatctgggattacaggtgcccgccaccacacctggctagtttttgtatttttagtagagactgggttttaccatgttggccaggctggtctcgaactcctgacctctggtgatccacttgcctcagcctcccaaattgctgggattataggcatgagccaccacacctggtcgcttaaaattttaagtaacaagtagagtgagtggcatccccgttcctggtttatctctgtgccatctcacggtggggcagaccagggggaagaagagaagaaaggagagggagtagagttgggaaagggcagagagaggggagggagggaagtgatgagaacaagcaggagggtctgggaggagaggagaggggaggaaaaagaagaggaaagagtccagagaggccgtgctttctgctaggaatggctgggaaggactttaaaaggagcacaggagttgggtttcctccaaaacacccagagtcctcgcccaccccccactcctccctgcactacccccccccccacccaaccatcaccaccaccaccaagagcaaactctaagaggatctcaggtgttttcctggatcacagaagcccagggagcagaccccacagctaacactgactcatgcctcttccatgccaccccctgcccctgtgccccagagcctcccttggttcatttttggcaatccttggttcctacaattcctgcagctgccttgattcaaactccctccccaactccaccccaggcttaagggtggactggatgggagctgcaggtcatggcggaggtcgggggggatctccagccagttacaccccaaggagatggaaatcaaagccaatagaaactcctgttgttcaccagccccttcaaacatcctgcttggagcagattcaggctctggaaaagttcacaggaaatcctggagatcagatgcttactcagcaaccacaagctttatcttgggtctgagtcccagaaaacaaagacaaaagtttcttctaagactcccttctcccttcgccaactggtggagcaccatttccaaataaaggggctccaaaagcaattctaaagcagaacttgaaagtcaaatcacattctcaaagctcgtgcagttaaaacacgggtcagatgcccccagacagagtccccccacaacccgccctcccactagctgcagaaaagcagctaggcttgagccgttcaattcagtagccattaggattatgtggttcttcagcacccagtgtagccaaggaattgaattttttaagtttaataaacttaaactttaaaactgaacagtaacatatttgtccatgaagacaactttattgttttgtagaactacttactgtattcatttccaattgctactgtgatgaattaccagaaaccttgtcacttaaaacaacaggctcggtacagtggctcaggcctgtaatcccagcacttcgggaggctgtggtgggcggatcacttgagtccaggagttcaagacccaactgagcaacatggtgaaaccccatctctattaaaattaagaaaattagtaaggcatggtgacacgtgcctatagtctcagctacttgggaggctaaggtggggaggatggcttgagcctgagaggtcaaggctgcagtgagctgtgcattccaaactgggggacagagtgagaccctatctcaaaaataaaataaaacaaaataaagcaacccacactttttatgttacaggtctggaggtgagaagctcaaaatgcggcctgcaggctaaaatgaaggtgtcagcagggctgcactcctctctggaagctccagaacagaatccctttgccttttccagcttctagagaccatccgctttccttggctcatggcccctttctcctcctgcaaagccagaaatgttgaatctctcggaatatctaccatagccacagctccatctgaccacagccacaaaagattctccacttttaaggaccattatgattatactgggccacctggatcaatgcagggtaatctcctcacttcaagatcggtcacttagcaaccttaattgaatttgcaacccaaattctcccttctgcggtataaagtcacatattcacaagttcccaggattaggtcatggttggaggccattcttctcgctaccacattgcagttcactgtaacctttgcatcaaattgggcattactgtgagttcttgtgcaagtgttgggcaagtgtaccatttctagcatctcacataaacacatcacccacctagttggtgtcaatggattggttccagtgggatgattatttttctgtggacaaatgtaacattgtaatatgtttatttaaatatattatgcagacttacaagttacagcgatatctgtgtaattaaattgaaattcttattattttgactttgatataaactgtttttctagtttcaaaaaataaatatggacaaaatttgagatttaaaatacaggaatggtactgatacagaatcaaatggagatgcagaactataaagaaaaccagagataccacaaatttcatggtgagtggcaattatagtttgtttctgcaggaagaaaacaaatagctttttatctgttggattaaagataataaaatgaacactagtcacagacattcttatcaaatacataatgaatttgaaaatacgttttctttcaatagtcagaaagaatcaacaaaacaagtcaactaaaatcagaaggaaatggccaataaaaaaattgtaatgaattttcacttcgtaactttggccagctaggaaatagttagaatgcttgctcagaagaggaaaaactttttttttttttttttttttttttgagacagagtcttgctctgttgcccagcctggagtgcagtggtgcgatctcggctcactgctaactccgtctcccaggttcatgccattctcctgcctcagcttcccgagtagctgggactacaggtgcccaccagcacgcctggctaattttttttttttttttttttttttttttgagacagagtcttgctgtcacccaggctggagtgcagtggcgcgctctcagctcactgcaggctccacccctccaggttcacgccattctcctgcctcagcctcccgagtagctgggactacaggtgcccgccaccacgcctggctaatttgtttgtattttttagtatagacagggtttcaccgtgttagccaggatggtctcgatttcctgacctcgtgatccgcccgcctcggcctcccaaagtgctgggattacaggcatgagccaccgcgcccggcaagaggaaaaacatttttaaatggagacttttgaaaaaaattatttcagtataagaattttgttacagtataaagaacagactaaaaaattttttcttgaagagtataagatcttcacttaaaccaacaaatgaccatcgactcaaaatctttttgaaaatatcaaaaataaattgattatttgaaaaacttaaaatattttagcctcagatagttgcactgcccaattaacactttgagtaaatttcatctcaaaggattttcaaatttaagagggaatgttgtccattcacggcttaaaacattgaactcatggcatagataattttgtatcttctacatctgtcaaagaagaatttcagctagaaatgagaaaattagtttctatcatgacagatcagctatcttagatcaaaaatccagatttgctggaatattgaaagaagagactgctatttcccttaatgcttcattccacagtatggtacatattaaaaacatttgtgtccagtcttctgaaacagactctaggaagtgccatggatatagtggttaaaatcatttagtatttttatgtgcaagggctatgaatcatcatgactttatggctgaaaatagaagacaacgaatttaatgatgttgtgttctttctttgctcattggctgagttatgaaagagttttacaaagatttactgtggtgttgacttgaattcaagatttctttgaaacaaaggacatacttgccaaatatgcaatcaaagacaaaaacccccgccagtttggtttaacgttttctcactattatcacacacatatgaaagagctaaatttgaagccccaaagaatgaaagagtttatcagtgacctagtcagatgggtagacgaatttatgccaaaatttgaacctttcataatgcaaatcaataataatgattttcacatttttccaacacaaatcaatatgtagattttcattgtaattggcagcattatgtaaattggctgcaaaagctatcagaaaaatttgaagaacatttggttaatattgataaattttgaggttttttttttcaaatttatgtgatgtcccctttgcattcaaggttaataatactgagttatcacaagagttagttaatttacttaacttggatagtttggaaaccgatatgctttggcttcaaagtcaaatcacttcttctaaacaacaagatgaaccagttttggcaatgtgcatgggaatgttaaaggaaaatggtttttttatgcacaattccaaactttaaatatgtttggaacaacataaatataggaatccacgttttcaattgtcgatttcaactttacaaaatctaaatattgatcaactatttctgatgaaaatatagtggctaaattgaaatgtgctataactgtaacatacaccggatttcaaagacagacagaaaatataaactatgttatcaataatctttaaattattatatattgatatgacaatattttggatatagataaattttaaaagttaatttcacctgtttctaatttttttgtcatggatattagaaaatgcagaattatatggtggctcacattatattcctattgaaccatgcagaattagactttcttttcagagaaactgaagcttgcaaaaagatgctcttctttcctttgattcttcatttccatgcatccaagtccattttaataaagcttacaaaatgatgaccaaatctatcagcaaatttgatttcatccatgttaagtgtaaaaaaaggtactcattgttggcatagaaaaactcagaaattacacaaaacgttcaattattggcccccctttaaaaagtcaggtctgaccagcttgggcccgtatttccaagtagtgatacctgcccagggcccatctgcccctcccttgcccaatgtggttgtttgcaagccagtttatcacagttgagtgttcagagtcaattttccatatttataacattagagaaagtcatctatgatctccctagatttttaaatattttcttgtcattttaaaaatattatgcatacttgtgatggtaaatcttttctcattttttatgatgcaaatatttgttttattctttttattgtacaaacgtatgaggtggttgtctattttatttgtcttttgaaataagcaactattttgtgtttgtttgcttagagacagtctcactatgttgtttaggctggccttgaagttctgggcacaaacaatccttctgcttcagtctctcaagtaggtgggactatgtgcactcaccaccctgctcggcttctgaaataatcaactctttattttacttatcaactttactatttttcctaataaatttctgctttactctctaataatacaactttctgttttctgctttatttatagtgttttctatactctttagtttaattattagtcattcatagcccctcattcttaacaataaaagaattttgggatatagattttcctctgaatatggctttggctacatccaagatgttgctgtaatatatcaatatttgataaataatattgatataaaatttaagtttctattttctccttgatttaaaaattatttagaagagtatgctttaaaatttcccagtgaaattatcaatttgttagagaaaggacagtggtgaattcatacaaaggagcactatgcagcaataaacaatgggactgatatacacaacagcatatgtgaatgtcgccaacactatattgagtaaaggaagctgacacaatagactacaggccatataattccatctgtgaaagattcaagagcagacaaagctaatctatagtgactgcagtcggaatagtacagcggttgcctcttggaaggaggcattagctgcgaagcagtgcatgggaagcttcaggaggtgttctgggtggctgtacatgtgtaaaaattcactcaggtgtatacttaacactgtgcactttacagtacagaagatgtgcttccattttaagaatctagttttcttacaaatatcataaagcattattggcagaaaatttggcccgtaagttacatcctttccagaatttgttaacattctcctcttggccagagtaatggactctgttggttcctattcagcatccttctccccttcctccttcccctcccacccctgacactactccagatcccctccctccacacagcccgtggggaagcggagcctgccccagctccccgggtgggacttgagtggtcttggtcaatcatgacgattcgatctgtcttgcccatggcttccaggtgaaaccaatctgtgcattgtcttgggcaactcttcttgattcaagggtgggcgtttgatatcagtaacccaatctgactaaagagaaggacttttattgcatggttgaagaaattcctttttttcttccagtggaagaaaacaagggaggccctgtctcagttgctccacctcaccacagccagccttaagagagaggccgagggcccctgctggtgcccaccctggtgcccaccctcccttgacctcctggacatgggtttctacatttccccatgacttaaactgcctgagtcagagtttctgtttgtggcagtaaataatctacttgtgagccaagaacacgactaatatcaaaaatgttccgtgcgcccaggagaagaatggggctgtttctttggaacagagttgtattgacatttcataaatcaagcttgttcattgtgttgcccacattccttatctgcttatttgtccacgtgacctatccaattatgagaggggaaagtcaaagtctattgctatgattggggctttgtcgagatggtgcattatagtctttgcgcccagtgaaacatttggccgattaagatttgggcccgctatgtctgcttggtggattatagattttgtcagtagaaagtattcctcggcttaccatttcctgcctgtggccttcagttttgcttaatctcattgtcacatttcatccctgctttcggctcccctcatgttgtcccacttaccagagctcctttctttattatgaacctttctgggtcaggttatttgggctgtgtcttgtgaacggtttagagttggcttttgctttttaagtcaaatctgagagactatatctccacctgtttgataatatatgtttaccatcttttttttattatttttttccttttttaaaattgcattgaagttagttttcattttctcccattttcctcctggacattggcagtttgatcgccgctggcctttaaaactttaccaaacgtatctaaatctatggttctctgttgctatcaaaaagttttgaagatttatttctttcgtactgtcccctaaggcaagccctctggaagcttcccaagaaaatcgtttaaaaatggccccctcctctccagattgtcaattcctaccctcttccctgatttactttctcaaaaaaacttatggccaactggcctgctgtaggttaccttattttttcttgttgttctttaaaattttttttatttttctagatttaggggctacaagtgcgattgttacatggatataataatgcacagtggtgacatctgggcttttcatgtaccacacccaaataggcaccccacaggtaatttttcatccctcatccattccccactcgtccacactccccagtctccagtgtccattattctgctccatatgtctgtgtgcacacatcgcttagctcccacttataactgagaacatgtggtttttgactttctgcttccaagtcatctcacattgaataatggcctccagttccatccacgtttctacaaaagacatgatttctctattttttattcaattgccttattttgtttgctttctctccacactagctccatgagggtgagaatatctatttttttcagagcctgttatagccccagggcccggcataatgcctagcacatagtaggtgttttataagcatatgttgaataactgaatgccttttcttctctcttcccaggttataagccatgtggaatttcaatctcaagatattaataattttttatttgtttatgtaacttatagaacaagctacaaggtcagtacaagcactataaccatttggtagatgagaaaacttaaacttaaaaaggttacatcatttcaagatggcatagcttagaaatgaccagggtgagacttgaactcacatctgcccaatagtaaagtttgccttcttaccctccgtgtctggatcacacatacacctggcattgtaaatgctttcttggcattacctcccagctcaggtggggaaaacacggggtgaggcccgtgaaaccatcctgaccgatgctaccccttcctcagagtccaactcgaatgcctcctcctcagcgatactgcttcaggtcccgtcggtgagaataaatctgaccttgttaccttttctttgttgccttcatcaacttctgacttacattacagctgtgtgagcatcatccgctcaccaactaaaccgtgtcctccatgaggggccccatctaatgcctctgtcttgcccactgcaccaggggcagtacctggcatacagtaggcactcaagcaatgcaggtgaattgaattgctgaggtgtaataccaatggccctggcccatccagaccaagatctacctcctccagggagccttcctggactacttctagccgaaccccagctctctttatctggcctttaactgatgtgaaatttaattccatgaattgtagtgtgtggttgttcttggatggaagaagaaacaccaaccaaataaaagagtctgactgcaaagcccctggagaaaggaacaatggatgcccgggaacatcgtctctcaagtgctgtccccttgtggccagagcatggaattccaaccagcaggcaaccagctctaaagctaattactctgatttccttcccagctagccagcccaatgttgggccaatgaatcattagacatcattacattctttaaaaatccctactactgttcacctggagttccccgccgtacttagagttgcccatgtctgatgcagctcaattgcaaaccaaccagtgtctgtatctgtagcatctgtgattgtgacttcaaatttgccactcatatttcaaagtgctctttgttttctgggagatacaatagtgtgggggcagctacagttcctgtatccgtgagattacatgttagtgggggatacaggtactaaaccagtaaccccagaagcaagcaagctcattatcgtgagttgtgaaacctgccgttgactacagaaagcaagggatgtcttgactgccctaaatcatggtgctctccattctcctctctgatgggaggctggatctcagtcagatctccctgggaagagaggtcagtactgagcagttcagagcccagactcggggggcaaactctaatccttgttctgcctgttacaatttatttgaccttggggaagttattctgaaaaaccagaatatcctgatttgcataatgaaaataataataatgcccacctcataaggtccttcagagtagaaaatgaaatcttactttaatgcccagggagcactgactaagtgtagctcctatttgactcatgtgcacccgcggtgctgcatggaaggagctggtctggatcctttctaactggcccactagcgtttatgtgcagacgggttgtgttctacaagggcagggtaacacctgcaaacccccgtcctctctggagggttggtaggtcagcactaaggacagtgccatgcatgaggagacattatcagtgtcctgcccaatatccagattccttcttcttggagaacaagttccaagctggattcgggtagtaaaggcccacatgggccatgatctgtctaagctgatccgagatcctgcttccctctttcccagcctccctggcagctgggagtggccatgtaactcagttctaataaaagtctgatggtagcttttctgggaaagcttttttctgttaaaggagtgatgggcctagcacagctcttcccctttcttccaccttgaactcagatgtgatgcctggaggtatggccatcctcatgtgaccctgaggcaacaagcatgaggaaggaaagccaatatgctcagaagggtgaaacaaaagataggaaaggccggatccctgaggatgtgctgggcaaccgagcccagaaccaatagcccacctatccacggcctcgctgtgtgaggcagtcagggcaggcggattctccagggcctgcagtggaatgcatcttcagggatttgctttgcgtggcccttaagcatcaggtctcatctcaggttctcagcctgcagctgaacacatcttcagggatttgcttcgtatggtctcaagtatcaggtctcatctcagggacctttctcagaatggcccttccctctcaggaccaattccaagccagaggagaaggtcattcttctctatttgctcagagagtggatggaccattaagaacaggaaacttcttatcaagagggaacctatcagcctagacgttttctaccttcccaggtcctgcattggaccaacctgaaagaagatatcagggaaattaaatatggtgctctcatccctgcccccacaccaagattcatgattggaaacacagcataggccgagcgcggtggctcacatctgtaatcccagcactttgggaggctgaggcaggtggatcacttgaggccaggagttggaggccagactaggcaatatggcagaactcccctctactaaaaatagaaaaaaataagccaggcacggtggcgagtgcctgtaatcccagctacttgggaggatgaggcagaagaatcacttgaacccgggaggtagaggttgcagtgagccgagatggtgccactgcactccagcctgggcaacagagtgagactccatctcaagaaaaaaagaaaggaaagaaggaaagaaagaaagaaggaaagaaagaaagaaagaaagaaaggaaggaaggaaggaaggaaggaaggaaggaaggaaggaaggaaggaaggaaggaaggaagggaaggagggaaggagaaaagaaaagagaaagagaagagaagagaaagaacactcagcatagcagtgaccacagaaaataattctgggaaacggtggattcccgaattcctgtctaccttcactgaaggacttaccacccctctgttcagggttcttgtttatttacttatttatttatctttgagacagggtgtctctctgtttctcaggctggagtgcagtgatatgatcatggctcagtgtagcctcagccccctgggctcaagcaatcctcccacctctcagccacccaagtagctcggactacaggtgtgtggcaccacacccagctatttttttgtattttttgtaaagacagtatttcaccatgttgcataggctggtctcaaactcctgggctcaagttatccacccgccttggccccccaaagtgctgggattacaggcgtaagctactatgcctgggcagtttattacttttaaaaattcatggtggttggccagccacaggagctgcaaaattcctagagctggagggagccatgctgcagaattgtattgctatcatgcttcagaggggtagggttagcatacccagaggggcagccgaatcccatgtgtccttctggtgtcatcacacccaaactcccagactgcactccagtgtgctccgtatcatgccctcaactcccttcgcaaatcagccctggtctctgtccttgctgcactgggccatccttggctagagatacagaattcttggcccccaacccagtcccaaacctgaccctccccagccccatcaccataatgggcaccagtacctgccacccaagagtgggctgaaccacccttgaacccccttaacctccccactattatacatccagttcagtgtcaactccgcccacattaccccaaaacatccatcgaaatcttccccttctctggagctccatggcttataccccagcccaattcaccagccttgctcacccggttaaagaggcagctctggctgtctgctctcctcccactgatgtccccactgcagccagcatgactttgtctaactcggatccaaacctgtcacctcctgaagccctccagtggctctcacggcacaggaaatcctggggcctctctgtgctccctcttcccaggacccaggagcccacgtgatcttgttcccttccctcctgcccctcctgtctcagtccattcaaactgctacaacaaaaccatgggctgagtggtttaaaaacagaaacatttctcacggttctggaggctggaagtccaaggtcaaggtgtcggcaggttcagtgtctattgagagcctgattcttcatgaagggccatcttctctctgtgtgcacgcacggtagaaggggcaaggcagctctctggtactcacttcccaaggctgtacctccaagtgcaatcacactggggatgaggtgtcagcaaatgaactggagagtgagaacacaaatgttcagtctgtagcggccaccatggcctctgctcgctctgctccagccacctggctttccctcccttcctggaacacaccaacttcactccgaccactattccctctgcctggacttctccaggaagagctttgcgtgacgagctactctgcctcctccaaaactcagcccaggagccccctcgtgaacgccttcgccagctgaagttgtcttgttttttaatttatctgattttgtcagctttctcctggactccctgccctcaacaagaatgtaaggtctttcagggcagggattccacgaacctgctttctcagggcctagaacgtggcttgaaacacagaaagtgctcaataaatgctcaacatgtcaatgactattcacatgggaaaacatgcaagaaatctgacttaagaagaaacctacaatatgccagttacatttaaatttcagataaacaaatatttttagtatgagtatctgccatacgtatactaaatatttgggacatccttatactaaaaaaaaaattgttgatctgaaattgaagcttaacttggcatcctgggttttacctctgacaactctaatctaatagaaccatccattttatgctaaagaggaagtctcaaagctggctgggaagcttcagagaaagatcgagccctgggctgcaccagagggactgatccaatctttgggttcgaatttctctgcctgtgattctaatcattcgctgagtttggggatcgtgacgctgaatcctcagaacatacccaaccagggctagcaccagctctgaggagtaggggactccctgccgatgggggagatgttcccacactgggggtgtttggggagctctggctatcagggaaaaccatggtcctctcttctctcaacagggcacagctgcttcagcctcatccagcctcgcctgtcccaacgttgttccatagagtgtaaaaagcagcccagcagtgtgaaaaacagcccccaaactcccaggagtgtgaaaagcagcccccagactcccaggactgtgaaaagcagccccaaaaggccgtatccatatcctaacccctgcagctgtgaatgacagctgatttggaagtaggctttttggagatgtgaacaactctttggagaagtcctttggatttagggtgttcttataagaaaagggagatttgaaacacagacacagagagaagaaggccatgtgaagatgcagagattggccaccagccactgggagagaggtgcggagaaaactctgcctctgaggcttgagagaattgaccctgccaatgccttgatttctagcttccaggtttcaggaccgtgcgagaataaattctgttgtttaagtcacccagcaaccctgggaaacaaacacctcaactggattagaagcaaactgaggacactaactcctgcctttttataaaccaccctctcccaagcacctaacattctccaggggatgcaggaagagctgaataaaggcctaaaggtgaactgagtcaagctaagttccagtttccataacaccccgagacctcaggattgggcaaaagaaaggcaatgtcaccaccttggtgacctggctcacagcaggatttgctggaaattaatcactcaggatcagggaatgatgcccatgaagctaaggtaccaggagggagtggcgttgtggcgagtgccactgcctgcctctcccgtgaaaggaagactcggtgaagtaagaggcactgggcagcctgctcgggtgaacaggtgagcatcggcctggggaagggcctgcagctgggggtgggggtggtgagctcaagttctggcaaggctgtgccaacatggtactgggcaagttagaaggacacggtggccctctcaccaccatgggtacatggacagcaggctcctctctttagaattgaggatggagaggaagccagagctcagcaggcccatggagagcaggggaggtaagacgtggagtcaacgcccctttctggctgcccctttctggcaaaatcgcctccaagcaggaggtgacggctgagcccatttgtcggacaactcagaaatggtttatttgtacacggccttcaaatgtgcatcccaatgccagatgcacccaaatgatcatcattccttgctagtgggggctctcaaacttgaccttgcatccacatcacggactcgcccagaggacttgttaaaacacggatggccgaggcctaaccccagagcttctgatccagcaggtttggatggtacctagatggtctccattttttttcttttttttttgttagtttttatttttattttaagtttcagggtacatgtgcaggatgtgcaggtttgttacataggtaaacgtgtgccacggtggtttgccgcacctatcaacccaccacctaggtattaagccccgcatgcattagctatttttttctaatgctctccctccccaaaccctaccttccaacaggccccagtgtgtgttgttcccctccctgtgtccacgtgttctcattgatcagctcccacttatgagtaagaacatgcagtatttggttttctgttcctgtgttagtgtgctgaggacagtggcatccagcttcatccgtgtgcctgcaaaggacatgatctcattcctttttatggttgtatagtattctatggcatgtatgtaccacattttcattatccagtttatcatttggattgattccatgtctttgctattgcgaatagtgctgcagtaaacatacgtgtgaatgtatctttataatagaatgatttatattcctttgggtatatacccaataatgggattgctgggtcaaatggtatttcctgttctagatctttgaggcatcgccacactgccttttgcaatagttgagctaatttaccttctcaccaacagtgtaaaagctatttctccgcaacctccagcatctgttgtttcttgactttttaataatcaccatgctgactggcatgaggtgggacctcactgggttttgatttgcatttctctaatggagatctccatttctagcaggctcccaggtggggccgctgctgccactgtggggaccacactttgagcagccggtatagggattttgactgagcctcaggccgcagtgaggccacatttgccctgcgtgagctgctgctcgggaagacgggggcttcatacctcagtgaggtgtccctcactccacaaaccttggctggacaattgctacgtgccagaaactgctctgccctggggatgtggagatgagtggggcgtccttgtgcatccccgctccccagccacagcctagaaggggctccctgtgactactcctgtccctctcagatcactcttggagttgtagccagggtgatctttgaaaacaccaaatcctgccacatcacctgtcccactaccctcagcctaggagctgggaactgaccagttccccctgtgctataaatgagagcacgtcgctcaaattccagttatttcctccaattacgtcctcccccaacacctctgatgtcttgccaggactctgaggggctgacaggcagcagaggaggtgggaggcccaagggcagtggggagcagaggccctggatctaaggtgacctcatttcagcactgagtcctcacccaggattcccctgggaaaactgagactcttggccaccctacctggttgctcctacttcctgagtgatttggcctcagcttcatggccgataaacaagaacagagaggggcatatgggagcatttacacacgtgttctggagccaggtccaagctgtgggaccaggatgagctgcctggcttttctgtgtctcggtttcttcacctgcagaatgggcatgacaatagttcctgcctcagaggagtgctttaagaatccaatgataaaatgtatgaaaaaatgctttaaactgtatatggcaggtggtgcattggctactataaaattaattatttctttaaacatgcatctaaaatggctcaagccctcatttttctagtaatgagaatgaagggcatttaaagtcatttcagttgaatccaaaaagaacctctgctaatatactgcttacaacaaacactcttagaatcaaataccatgcccaccaaagactgaatataccgaggtttgcaaaaaagatatgtaaagatacatgcatgtgtagtgtgttgggaggggtgggggagaactcaaagaagcagccgtgaaaaaaatgactggaaatactaagcaatcgaattcaagatataaacattacaaagaggcttatttcacatttacatacacaagagctagctagtattcacaatgatggtataatagccatgaagctttatgcattaagtaatacagtgctaaaatatgtaaagcaaattgtctgaaatgtcattaagcttaagtatttcttcctgaagaaacccttccaggatccctcaagggctctacaggggactccacttgtcttatcacaacatttatggttagtatttgtcatcattcgcttaactacctctccaccgccctcactagaattgaagccctgaaagcctcagtctgtcttgtttatttgttgtgtgctctacaacccatgtgcatgcaataaatatttgttgactgcatgacaattagatatatattcaactctatatccctgaaacagaaaacacactttttttttcaaatattcatggatgtttacaaaaatccatcatatacatttggtcaaaggaaaattttaataaatgtctaaatgaagaaattgtatagagaatgtaacattctctgaccttatagcaaaagaataaacaaaaaaaacccaacaaaaatctccaacctgctgaaattaaaaattactttatgaaatagcttcagtcaaacaagaaaccaaaattgaaattagattatttataaagtaaaatataaacaacaacaatccacataaaaatgtatgagatgtggctaagtctatacttggagggaaaaaaaatgagagattgaaatgttttcatatttaaaaaacaaataactaaactaaatgaaagaagcagtcaaagctagaactaaaaagaactaaaaaaagaacaaaataaaccaaagacagcagaaggagggaattaatagagataaaataaaagtttattagaaaacagaacaaaacatagaatttataatgatattcaagagcttgttttctgaaagacaaacaaagtagacatggaagtggaaattttaatttaaacatataaatagtctcatcacaagtgatttttttttacacttgatcttatccaaaaggccaagaagtgatacaatagtgtttaaaaaaaaaaaaagctataaaatagtttttaaactataaagtaggagtgaactacggaataactctgaaaatctacaggaaataaaattataagattttactctaaaaaagaacattctagaagacctaaatatgcagacagtctacgctcctggatggggaaaattgagacttgtaaacataccagcccttctcagattaataagtgaatttaatataattccaatcaccatactaatgagatctgggggccagaggaaggcagattttaacaactgagtataaagctgctctgagaaaaaaaaaatgcatggcaagaactaagacagttctgaaaaatagaataatgaagaaagccagtgaaatgggtggggatgcttcacccaggcacccaggagcagggatctagaactgagaggatagggactcatggttgtgggtgccctgccttctgcccctcattcatcctgacagcctccctggccagaccaacacccagccgctcaccccaacacccaagacgcttcgaccacccacagtccttcaccagacaaggcgagaccaacacccagccgctcaccccaacacccaagacgcttcgaccacccacagtccttcaccagacaaggccagaccaatgcccagcctctcacctcaacacccaagacacttcaaccagccacagtccttcaccaaacaaggccagaccaacacccagccactcaccccaacacccaagacgcttagaccacccacagtccttcaccagacaaggccagcatccattccctggccctcatctgctttggacttacaccaaagacttaaaatttggtgcctgtctgagcctaatgcttcaagatgtgattctgtagctgttgctatgggactaaacagaagaaagataattattaaacaaagtgggagcaggcagacccaaagtaataaaagatggtatggcccttgcacagacaacggacttaaaggacaaatagatgaacgtcagtgctgagctcgttcaggacactgcctttggcacaaatgaagaggccgggatggcagcaccaggctctgtggacaagaaaagctggcaatgtgtagtccagtgggcaccaggggagggggtgatggaggccacccatgctgtgcctgctgaacttaggaagcagcctgtgacaactgaagaagggaagagcttgaagaacttgctcaggctgcaaatggagaccaaaagaaaattgcacagcatcatctctggtgcaaggagaaaaggtcagaagaaagagagtctttacagtcaagagtgtaacatcaaatgactgattagaaattattgaaaacacaaaattcaagggacattttcccctccatatgttattgacacatccaaaagttcgaagtatgaattccaggatgcttgcagtgagaagcaacattctagtgtccagtcccagaggaaagagctatttcttccacaacatccctatcaagagtccaggttctgacctctctttggtctgaacttggtcatgtgcatagccccgagccaatcgtggtgggtacaggcttagaatcgggatgcctgctgcaactgcacagaccaatctggttcaactttgatgtaacaacgttgtcagttgttttccattgccgtggaatcccaggttcaaggtcgtgtaatctgagcatgtgatgaaattttaaccttctctttctttcagactgaaccttctggagaacatcagagatttcccaggcccccatttttaactctgggaagtgagcttggcaccatcgggtgtccagttattcaaaagcagtgcttccattccctcccttacctcaccctatggtcacatggcttccagctcatcaatccctggaagaaagatacattccagatttggggatcaacagagaagagccctgctctgctgtgggacctcagctgtatctacctcacaagttgccatcaacaaagaccccttctggaggcacatcagaggggaaaagggtgggcaggggtgcttgttcttggtgaaatcagcatttccagttatcgtttaaaaatgccttcagaaaagacaatccgtccaagggaaatagtctcagggatattcatttctggaaatttatcccccattccctcccttgcaaagtcctgcgggctgctatttccaaaatggtgtggacctggatagattttggctaagggctggcttgaatgctctatgctgaagggatccagctgtcttcctctgggcctccatatcctgcttattgcagtagaaacgagatcattgtccctaagacaaaacaatagtaactagcattcatattgcatcttatatttttaaaaacactttcatttcctttgcttcacttctgaatcaggtactatttggtcctcattttacagaggaggaaacccaggctcacagagttgattgatctcagagcatcatctggaaagtattgaagtattgctatccagcccctgaagaacatacacatgatgtaattgcacaaattcattgtaaaataatagtaataataaaggtaaaattaagcactcgccaccagtggtgcaaatcccataactgctattttctctgtttcagtggtcatttccttgtgaggctgtgtagttattcatgtaaccaatcctctgttgtcggctatcgagcttgttttcacctttccaattcaggctttctggggtagatcctcagtcctttccaatgtactaggtggctctgccctacgggaagggacggtttacaagtcagattgacttagaaatcctttgcaactaagtggaaaatcataattaaaatgaccacctgcctgacacgtttactgcactgtcgcatccccaaaagcacaagagaaaatggatgggatgatacagtgatgactctgaagacatggctgcccacattcccacggccttttcattttcctgcagccagcgctgccctgccagggcacaggtaggccgggggttcccagtggcgtgctgggaacacttaatgacagagtatctacagggaggggagtcttgattttagtgcttgccagtttccatggtgtcaatactcccaccatgtcaagctcccagtgtgcgtcactggatgcaggttgctgggtgtaacgggatcgcgtgagctaacaggagctggaagtacccatgggttggaatgacaccttatgcaccgagagctccccagcccagctaagttccagttcccacaccgatgaactgcttggtaacatttcacttccttcccgcacctgtcttacgtcctgtcttgcttgtacccctgctggagttgcctgggatcagcttcaacataaactctacactcagagcttgcatctgggggagactcaacctaaagtgccctataatacaaacttcacagcaatggcaattttgaacttcaaaccacaataagaaggcaggagttcaaggcacgtgtgggagttatttcccacaaacattcagcatcaagaaaactccactagagtaggctgctgcaaggaggcgcctgtgacatttgggattggctgcaggctgagcaaagaagccaatacatctcagctgaagcagagaggagcacttcccatggtttagaacccagggaagaagaaaggatttcccagccctgtcccttgctctgcatctgcccggttcaagcctccactgcctctcacttggaccagcagcaacgccccagtgggtcggccccctccacattccacccttgtcaccccatctcccaccctgagcccggctgtctcctgctgaaacatatggccatgctcacctctttctttctctgcttacaaccctttaaaagcccctaaagatctcatcttccacaccacggcctgtggaacctcccatcatctggccctgcctcccctccagtccagccccaacccacccctgcattgcttccacccgcttgcctctctttgtgctgtgtccattgcctggaattctcttccttctcttctttgtgcaaatcctgctcatcttcctaaactcagcaaggagagtctcctcctccaggaagccctccctaacttcccttatcctggattagctaacattcactcccaggagtccccggcatagcactatcacctcactcatccactgtattgtgattacatgttcatgcctcagtttcccctaggagactgtgactttcctaaagaagccttatctgaatcaactctgcattcctgtagcttggcatcttgtttggggaatggtgggtgcttggtaggaattttaaggcaattcattcatgcattcattcatgcattcattcattcattcattcattcatacattgcttctggctgccgaaatgcctgcattctctccgctattgatggctaagtcatgaggagtggttgggaggcagcagttaaccaaattgattaggtacttactttatgctaaataaagtactggtagggctctgggtcttaagaagtggggcccctgacctcaagacacctaccaggagacaggagcgcacatctaatgtgctggaccagggcacttcaaattttaattggcacacaaaccacctagggaccatgttaaagtgcaggttccgactcagctgggctgggctggggcccgagggtatttatttatttatttatttacctacttattttgagacaaagtctcactctgtcacccaggcttgagtgcagtggcgcgatctcagctcactgcaacctctgcctcccaggttcaagtgattttcctgcctcagcctcctgagtagctgggattacaggcatgtgccaccacgcctggctaatttttgtatttttagtagagatggggtttcatcatgttggtcaggctggtcttgaactcctgacttcgtgatctgcccgcctcggcctcccaaagtgctgggattaccagtgtgagtcaccgcgcctggccccgagggtcttcgtttctaaccagctcccagatgacgcagccctgctggccccgagccacactgggtgcttaccggcaacgtgttgcactctgcaaccaaaggcaaggccgcatggcacccatccttccctcctgccccacatgctagtatgttccttcaatcaactctcactttgttccctaaatgtatttaaaggtaaattttaaattcttatcttaaatgaaaaagaaacatcacttttgatacacagaaaatacccaggagataaatagagtaaactgttctacacctggttgcacatcctcaactgatggtcctgagccacatccagctccccctctgttcaaatcaacttcaaaataaactccatactcagagctttcgtggccaatggagatggtcaatgttaggggttaaaggcatattagcactaagccgagactttctctttgagatcactagagggattctgaagaatggaaaaaggggccaggcacggtggctcatgcctgtaatcccagcactttgggaggtcaagtctggcagatcacctgaggtcaggagttcaagaccagcctggccgacatggtgaaaccccgtctctactaaaaatacaaaagttagccaggcttggtggtgggtgcctgtagtcccagctactcgggaggctgaggcaggagaatcgctggaaccaggaggcagaggttgcagtgagccaagatcataccattgcactgcagcctgggcgacagagcaaggctccatctcaaaaaaaaaaaaaaaaaagaagaagaagacaaatggagaaagggatgagcttctcagtttgtggttctctgttacttggcaacacagtgtgtgctgcaggcagtgttttgggagagcctggattgacaactgcagaggccactctgtccagcccaggcatgctccaagtgcctgaggtcattggcaaatgaccacagctgggctctctttggctcaagaatctccagattccatgcattttcatggcctagcaaaatgcctccagtatttgaaccccttgacagctggcctcgctatggcaccattccacgagagaagaatctcaccgccctccaccccattataatcactttagataaaccctgctcacaggcggcaagaaatttaaaaaaaaaaatgtgggaatagatgttgtttcacaggcagcagagatttagctgtgccgctttctcttcttaattgtgggtctgtccagggaacccacagcagtggataaatcacggtgatggttggcaagccactgttgccacacagctacccgaagagttacaatattatctgatgctgaaaggtggggatcagggaaaagggtgaatggatgactcagtcacagatggagccacaaagatgaagccattcattcccacccaccaccaccaccaccacaaaaaagaacatctgagcccccaccatgagtcagggatgagctggtgcacctgccctcaggggctcagccaatagaaggtgcaccccctaatgatctgaagtaacttgaaatcacagagtcatcctacccaaaatgcaaactcagtggtttcctcacctactcaaaaccctttaaggatgcaaagcacatctggttttgcttgctgcattcccattttcccgctggtaacaacttcctggtcttcttagtggagacccactccccccgacctttggtctacgtggtctgggtggggctggcgtgtgctcctctgtccctccaccccactcagtgggtgggcaagcttcccagaaccctggctacctaggggtggcatgtgaccaagagggagtccaggacaatcccagtcttcagttgacacatcctgaaaagcacacctgcttctgcctgggcttgccaggagtatcagtggggactctggacctgcctccagaaagaaaaaaggattcgtgatggttaactggatgggtcaacccaattgcccagggctgcccagatcaaatgttattctcggtgtgtctgtgagagtgtttccagataagctgagcatttgaattggtagactaggtaaagttgatggctcttccccatgcagctgagcatcattcaaaccactgaatagaacaaaaaggtggaggaatgagaaagccgccctgttttcttcctgccttcctgcttgagctgggacaatgggctccttctgccctggggctgaggtttataccaccgcctcccctgctggtcaggccttcggaatcaggctggagtcattcacggcagatggtgggacttctgagccttcatcattgcatgatccaacccctcctaatagatcttcctttatgtaaatatatatagcgatgatgaaggtggtgatggtggtaagaggatgaagcttcccacctcccagagtggaggaggaggctcttcggtgaccatgcactcagagagactctgtacctctgttcgtttctggcacttctggaatgagctcttaggattcatgatgaatccgacctcagttggtcatgggacaaagccttataaaatgtcctcagcggctccttccaaccttccaattcaatctcacaacacgtgagactgccatcaattgcagatgtgtcacctgtggggagccgtcctgagaggccacgtggcacggtgattgggaacacacacaccagagccagactgccaggtttgaatcctggttcaaatcccagttctggcacttctctttccaggtctctgttcagctctgattcccatctataaaaaggggatactgataacccctctatcatagggcatctctaagggctaatgagttaatacacgcaaagtgtgtaaaacgtgagaaggtgccgatatcatgactttcacgtgtgccttttttacggcattcagctcatccattcctcacaaccaaagagtagaagtaaaggagtacatttctttggcgagagcaaagccagaaattcaaagctttaaacagtgagtcctcttaattggagacacacaaaggatgttgatccagtgctgatatttataacagcaaaaattgaaaacagcttaactgtccaacaataaaggcttatctttatatacttgagtacatccatgtaacagaatttcatgtagccttataaaatcatgttaccaacatttatgtatagagaaaggtatttataataggatgttaaatgaaagaaaatacaggcctgacctgtaagcagagtatgatgccaactttacaaaatacatagaaaaaaatgaaaaatacagcaaaatgtttacagaggttgtctttaggaggtgagattaatttgcttttctctatttttctagtggacctatattacttttagaatcataaaaaacccatgataaatgttataaaaatgatgagtgctgccgggcgcggtggctcatgcctgtaatcccagcactttgggaggccgaggcgggcagatcacgaggtcaggagatcgagaccatcctggctaacacggtgaaaccccgtctctactaaaaatacaaaaaattagccgggcgtgatggtgggcgcctgcagtcccagctacttgggaggctgaggcaggagaatggcgtgaacccaggaggcagagcttgcaatgagccaagatcatgccactgcactccagcctgggtgaaagagtgagactccgtctcaaaaaaaaaaaaaaaaaaaaatttcagtgccagttagaggagaaccatgtttaaaagagagagggaaagatgattttcctcagccaatgcccttaaactaattaaaaacagcacccttcttcatccaattacttccagtaatttattttaacaaatcaaattgcccccaaattcaactttattactcattttttttgttgtaaaaggaaaccctcaagaagcaacaatcttctgccctctgcttgcctaagccatttgaatcctgcccgccttgctccttttacgcctgccatgttcgtttgaggagatgggaaccccagcatggctcctctgaaacatgtagttcagagatttgtgcaagccaccattatgctccaagctcaagcagagagaagattcttctctgcacatgctgtacctgagaccttccctcttcttggtaatttcaactgagagagtagccaagaccataatgtgagatggagagcaaaggatagcgtaagttggcaaagtggcactctcaccacaagtgaggctgtcattctttgatatcacgcaaacacgtatttacaggaccatcaaggagggtaacattttaataaagttgacttaagcctcaaagactttggggatatttgttactgcagcataacccaacctccctgactgacacactactgtctccccttctgcctcacctcactttgcccctgtcaacaaaacccactccttaaaaagcagcatgttaattaaattcacatgggacactgaatcaggagacatttcttacaatagtgaggtgaaagaaatagagagattaggattaggaacatagacagaaaatcacagcttgagatctcacttatcaaaacattaaagaaaataagaatgaagccaaatacatgtgggtaaagctaatcaagctagaggcagcacaggagactgagataagccaagagaaatggagagccggggggaaaccacagaatccctgtagatttagagtgcagtgtgattaggtatcatttgctgccaggcacagagcctggagtccacagggcaaaggaaagaagtgcccctctggagggcttctctgccactcagattattccctcgcttggcggatgtgttaatttgctagggctgccacaaccaagtcccaaattgggtggcttaaactatggaaatggattgactcatggttctggaggccagaagtctgaaatcaaggtgtcagcagggctgcttcctgcagttcccagtctctctccatggttcgtcgactgccatcttcgtattcacatggctttctccctgtgtacctgtctgtgttcaagcttcccctttttatcgggacagcagtcatcctgaattgcgactcaccctagcaacctcatcttaactagttacatctgtacaactttatttccaaataagggcacatcctgaggtagtgggggttaggacttcaacatatgaatttagaaagagacacaattcaacccataatggagggtctcgttctctgggtactgaagatatgcaagggtcccaggagcttccaggggtgtaagaggccaggcaaggaaaacagaacagcacaaaacgtgagtgatgatgtacacaggcaacagatgccagggccaaacagaaggcatgcacgtcctaaacgggaagcttcttaaaatttggggctctgcaaaatgccaaagcagaagctaaaaaactagcatcgagctcatttgtggtcctcagattgctaattatgatggtagcaatcccagttgtggaagccaccaagcctgcttgagtatcctgcctcactctccttccaggcacaggcttccagctaggtgtggccacatgacttgccttcccaagatgaacagaagtgacggatgtctcctctgggtggaagctataaaagccagtcctattttctcttttcttccgccacagtgagcagctgctctgttcatctgggccacagagagaggaggatcacggcatgagttagagtccctgccaacggatggtcccatatgaggaaaaaatcaatcaccattgtcttaagcttcggaggctttagggccatttgttactgcagcataacccagcctccctgactgatacacccccatctttcccactgttcccaccccaccttatccctaccaatagtacctgaatttatctcagaagggtggacccatccccagccccagagatgaattaaaaccatttcttcctttatgtgtagatgggttttctcccttggttttctgacaatcatgtcactttccccaaaccagaaacttaccctcttcttgtcagcttggtcatggctgtgaagaggcccctcatcccttctgcagccccttccaattcaatctccccagaatcatctctgaaaatggccttggagccctgattcctccatttggaatcatccagtggcttccctaatgcagcccaagagcctggcctgcctggcccctgctgacccctcagcctcctggcctggcctccctgcccagctccatgcacacagcctccagtgagcttcgactgagccctctccctccacacagtggtggcacatactcttccctgcatctgggttgttctttaccctgccttctcttctcagctccttaactcaactcttactctattttctttctcctgtaaactccacactcctcaaaaaacagctctcctatccctccatcctctacagagcatctgcctgcccctgctacctggcaagtcccatgaggcaagggctgcaatggatggaatgtttgtgtcccttccaatttatcctaacccctaatgtgatggctttaggaggcaggaggtgattaggtcatgaaggtggaaccctcatgaatggaattagtgttcttataaaaggaatcccagagagctgccttgtgctttcttccaccacgttagagtacagtgagaatacggtcatctggaaaccaggaagaaggccctcaccagatactgaatctgctgacactttgatttcagacttcccagcctcctgaactataagaaataaatttatgttgtttaagccacccagttataacagcccaaactcattagaacagaaaaataccaaaaaacaatgtgttgctgtaacaaatatctgaaaatgcagacagctttgcaacggggtaataggtagaggctggaaaagttttgaggtacatgctagaaaaagcctagaattccatgaagggaatttcgaaggtggttctgatgggagctcagaaagataagaggagtttccatcttcttagagaatacctaagtaatcgtgggtaaaatgttgagagaaatatggatggcaaagggcattctggtgaagtctcagatggaaatgagaaccatgttattagaaactggaggagagaccattcttgttataaaatgggaaagaatgtggctgaattgtgttcatgttctagtgttttgtggaaggtagaacttgtgaacaatgaaattggatatttagctaagaaaatttctaagcaaattgttaaagaagtggctttattcctcctgactgcttataataaaatgtgtgaaggaagaaataatttgaagatggagttattaggcaaaaaggaaccagaatttaaagggttgggaaattgccaacctatccctattgcaaaaaaatgagaaaacttgtttggagcagaatgctaaggatgtggctcagtgactatttgataagaagattagtacaaatatgaaccatgggcttgatcaaccgtctcaataaaagccagaagcaaagatggaattgttccagcagaagcactgctatctaggactaaaggaaaagaggtaacaggacaaaatgaagattataggacttcttagaccctacaggaccagaccatagaattcttcagatgtgaacattcagctttcttcaacacaaggaaagaaggaccccaaaggtgattcagaggtcactagagctgccactcccaccacaggcccagagtgcatggcctccacctcgtttgcaaaggtggagaggtctgcctccatctcgattgcaaagagtggaaccaacacccagtgaagccatagtggcccagcaggatcccccaaccccaacagagagctgaagcaagagggggcccctcctgggagccacagcatgggaagcaccccaccaagctggtagggatggtgttgttaccaccccagtgggtctagaaggcaaagcattgagccaaaaagaattattcttgatcttaagatctcatggagcttgccttgctagattttgaacttgctcaggacccatcatcccttccttctttcctatttctttctctctttttttgaatgtgaatgtctgtactatgcctcactcaccgttgtattttggaagcacataacttgtttggcttcacaggctcacatctggtgaggaattttgcctcaccatgagtcatatcttgagtctcacacatatctggtttagatgctatttaggggagactttggactttagactttagagttgatattaggatgagttaagacacttggggctactgagatgggataaatgtattttgcatgtgagaaggacatgaatttggggggtccagggtggaatgctatatatagaccgaatgtgtgtgtccccctaaaattcatatgttgtgatcttaacccccaatgtgatgctattaggaggtggggctttggggaggtgaataggtcatgagggtggggctctcatcagtgggattagtgcccttataaagagaccctggagtgctctctctctttttcactcttttctgtcatgggagaagacagccaactggaaggaggaagtgggccctcaccagccataaaatctgccacctcccttatctcagactttccagcctcctgcactgtggggaatatgtgtctgttctttcagccgccccatctgttattgcaacagaaatgactaggacaggggccatggctgttttcacttgcacttgctggggatgcatgggcgcccccatgcagtcacctccagatctctttctcacctctgtgtgcccacccctcacatcctgagccttgccaaggagacccaaacttcagaggagtaccctgtgggcagcctgcatgctgccccaccatgcccacagtcagtgactgactggtgaggtgaccaaggccagcagcacccactctgatcaggccagttctggggtgggggtaatttatataccagggctctccccgggatcaggcaggggaatgggaatcactgaagtcaccccctgattggcttcctctccatccctgttctggttcccctccctgagaggcatctcctgggacatgtcctaatcctcacctcagagtctgctgggacaacacctgccccagatgccactgtaaccctgggccttgcatggtgccagcacctggaagatgctgagaaaacatttgttcagtcagtaaacatttcccaataccacttttttttttttttttagatggagtcttgctctgttgcccaggctggagtaccatagtatgatctcagctccctccaacctccacctccctggttcaagcaattctcctgcctctgcctcccaagtagctgggattacaggcgtgcaccatcacgcccagctaatttttgtatttttagtagagatggggtttcaccgtgttggccaggctggtcttgaactcctgacctcaggtgatccgcctgccttggcctcccaaagtgctgggattacaggcgtgagccaccgggcccgaccccaaaaccatcgttgtcccaactggctgagagcccctgttgctacacattctgcccctccctagatgaaacagtactatgtcaaagctgtgcttggggcactccctggactgtcagtgtcccctgagcgttaattggagtcaggaaaagttacagcctctttgagcactacctgaagggcacatcctttagagataaactagcacaatattttctcagtgtttctccagttttgttttgttttgttttaaccacaatcttccctttttccctcttgcttttgatttggagtgaaaggcatgcacatggtggggcctagaacccaatccaaaccccagcccccggcttcaaagcaggcatcaaacccttcagcctctttgttggctgataaatagaaacttctgcctctcaagacaagcccgaaatgaagcggaatccttgttgctaagaaaaatgacacgtgaacggctcccgtttgagctcccagaactgccccggtttcccagggctggctgcacgtcacgatgctggcggaaggagaccgtgggcttgattgacaccacagcgctagcgggaaatggtttctaaacttttgcccagctagcggcctctttcctgacctctttatccccttgaaagcaaaatagatcctaggaactgagatggagctgaagtttatgagttagtgtttccagagagacaatcaagactgggattccttctcccaaggttgattgggttacagttaagaaaacgccatccactgcaaactcaatggcctcagcggccaggttggtgacgtcacagtcagtgggttagacatgagagaaaacagtaaatggtggcaagcggtgcaactaggaagctcaggccccatctaaagtagaaacctctgcccagctccagataattgttgccacatggaaatacagcccagaactgtcagctctcttgatttttcaatagaagttagatggttgtcttctaagttgcaatttctcaatgatgagacctattcacattttttaaaaagcactaggcacgtgcctggcccaatgagtctcagactcttttaaacaaaagagtttcaccagtgagatttggaaagcaggcatttgtcatcagagtagcaggtgtggttgtgcctagagctccttctgcttccccttaattccagggtggtgaatcagagttatctcagttattgaaaatatgtatttcaacaaacagtggcttgaccaactcgtcctggcttgcctgggactgtcccaattttaaaacttaaaattctgcctcctggagtcctcctcagtctcaggaaaaccagaatagctggtcacccttaagaagggatgcttggtgagccattgagttgtgcccccttgggagctcattagctggaagaggaaatgaaccctttgtgaaataactgaaaatagcagtggggactgtgcctctcagagtcaaaatcaaacatcacttctcaagaccttatctcgtgaaacctaagatgagcacagctgtgctttcagacaaagcctgtccaacttcccagtttactacagagagttgctgtgagggcctggatccctgaatggctgcgtgaagccgcacccctgccaccacatactgggcggtgattgtgtttggcctctgagatttgggggttttctgtcacagcatttggactcccctgactggcacgctattggacccttaactttttggccagcattgtctagcatgaggctggtctccttatcctcccctaggaatgtggatatggtgttcagggcctagatggtctctactggctacttgaaggtatgtacaaaaggcaccatggagtggtcaggttctcagaggagaggacagaactagcgtgaggggtcaaattgtgtcccccaaattcctatgttggagccctaacccccagtaccctagaatgtgactgtattgagggatagagttttacagaggtaattaagttaaaatgagtgcatatgtgtgggcccaaattcaatatgactgggggtccacacaataagaggaaatctgcacacagacacacacacagaggggcaactatgaaagacacagtgagaagacagccatctacaagccaacgagagaagcctcagaagaaggcaattctgccgactgcaaaaagcaaggaaatgaattctcccctagagcctccagaagaagcacagccctgctgccaccagaaccgtaagacaatacatttatgttgttttcagccactcagtttgtagtaattcattgtaacagaaataggaaactaacacaactttgaatagtgtatttttcatacaccccagccctgaacttgtttaaatgtttgctttcttttcctctcaactattaatactgaagctgggtcaatgaaggaatgcacctgagttttgaactctggttgagttccaaacaataagcaattgatggaaagaacaattgcacatacagccaaagttgttgaaaccctcgtggacgtgtgaattttcaaaagcaaattgccaaccctctctctgctgcttcgtggtttatttgatggagtgtgtgtttagccaggcaggggtagtggggaaaaacaaggctctgtcctaatgctcccaccaaagtcatgggctgctcagggacacctacttcagcaggggcagggcacatgcaagggactccaaccccaatgccagtgaaacagcaagagaactgtcagctttgccaattgcgtatcctctggggtgtttctcattttagtctcacaacaggtctcataccctcctccccttaagtgacatggtgggttaggagagtggtgctgcgggagagacgcagtgctgccaacacggtgctatggctgcagtcacacgcccctcaggctggagaaagcagacagctgcacccacgggctcacatgtgccagctccatctgcgagatcattaaaattgagccttggcagaatctgcagaaaaacacatttgttttcttcgtaaagaggaagagtaaactttcctgtcgtcctcataagtttctgcaattactttaatgtgcaaagcgccttgtacaaaagcaggaagctgttacccggactaaggcaccaggatgcatgcttccgttaaattatacgtgaaattacacgttctctagcgctggtggcttagtcgccgtttaacagtaataagacacacaattccagtgctcacaatggtgttcaggggcttggcaatttgcttctcatgctatcacgcatctagccaaaccaggtaggctccaagacaatcattcagacaaaacagactgtcttgaagatgaggagaggtgtggtcctcacaaacctggagtcaccaagaagagaatgagcccgggaaatctgcaaaacaggagtgccccagcttccgagttcagagaagagcttctatgtccatccttttaatatatgatagagatcctgttccggattcacaccccattacgttcccaacccacctgcacccactccccaaaatgaaaccgactggagccattcagacagcctgaatctctgctctgtcacttcatatgtgactccctgagcttcagatttctcgtctgttaaatgggcatttgattacaacttcttctaaggaccctgccgataattgagagagataatatctataaagtacttagcacagtgtttgtctcataattgtctattactgtccatcattatttctctgcaactattctattaaatactttcaaagctttagtcgtccctccagtgcagcccttagccctcatcctaaacctagcactgagttctgtgaggttctgagcaagggatggcccagctgctgcttgcaggccaaattctgcaagccacctatgcttgtgcaccttttaagctaataacagcttagtgatcagggaaaaatcaaaagaaacatcagacgcagtggctcatgcctgtaatcccagcactttgggaggccaaggagggcagatcacttgaggccaggagttcgagaccagcctggccaacatggtgaaactccgtctctactaaaaatacaaaaatttaccacgcgtggtggtgggtgcctgtaatcccagctactcaggaggctgagggaggaggttcacttgaatgggggaggcagagtttgcagtgagcagagatcgcaccagtacactccagcttgggcaacagagcgagactgtctcaaaaaaataaggaaagaaggaaagaaatccaaagaagcatatcattttgtgatgtgtagaaattaaatgaaatataaatgtcagtgtctataaatggttttattgagatacagttgtgcctattcatttacatattgtctatgcttttgtacccaaccatggagttcagttgccacagagaccatgtgacccacaacactgaggatatttactatatatcctttacagaagtttgcagatctccatgccagggaataaaaccaatgtcttcagaagccttggcccagtctcgtggttgatactgaaaaaccccaagacatgacctgctaggctggatgtgaggagcacctagaaaggtggccatttttattcgttcagtggcatctcaaccaaagacaatggggagagcagctagtggcttagattcattgggatgaccctgacattggagccaagaaagccatgtttaaatcacagatttgtcactcccaggcggtgtgattttgagctgatgacccaaccttgctgagcctcgccggtctctactattggctggggatgtcaatttctttggcacagaattgttatgacaaatgaaataaatgtcagccccaccacagaggatcagacactccacctctgaataacagttattccctccctccaaaatttgtcttgtggtctgtaaaaagagagcgagagagagagaacacatcaaaagagaaaaatcattctatgatatgaaaaatacataaacttccagtttcagctctgtcacataaacagcttggaagttgtcactcccatccatataacaacaacaacaaaaagctggacaaactgaaaaccaatgacttttcatggacccatcagagaactgagttttcaaggtaaactaccaccccaaaatctggagacacagatgaacctagagagtaacagctgagctccacttacccagaacagaagctgctggagccataactagtagaacagttacatggcaattttgacaaattgctaacgggtgagtatagaccagctctcagtgagaaactcctggggctgcaatcttagggggactccacaatgtcaagggctttgcctccaggaatccccaagttcttattgagaagattctagaaagagcatctcctggctctgacaaggagaggaagagtaattcttatttaaaaaaaaaaaaaaagccaccagagccttctccataacgaaggcccattccccaggggaaagactgtccaggcttatcccagcttggggaagggcattttctcactgcagccccctctagctttcctgtctcacctacaggtgggagaaacagttgcgaaggtcacaggccagacacaggacccctggaagactgagatttaatctgaagattatatagaacactccccttttcccgcaatttaccacctcaccaacagggttccagtataacagcagtgaattacagctgaaagggctccaagaagcagtactctctctgaggagggcttggagaagttcaaagtcaagagtggggaaaaaataaagacctaaagaaatttgaaatctctggcacctacagatatagcaaacattaaacacagaccaactctaagtaaaattaacataaatcctcacactaatggcctacttagctcaattcctgctacctgatacaccatgtctggtttcaacaaaaaatttaaaaggacacccaaaaggaagaaagaaaaaacacacagcctgaagagacacggcaaacatcagaatcagactcaaatatgacacagatgttgaaattatcagacagggagtttcaaataactatgattaatacattaaggactctattgggaaaaagtagaaaacatgcaaaaacggattgataatgtaaccagagaaataaaaattctaagaaataatcaaaaggaaatgctaacatttctaacagaaatgaagactgccttagatgcactcatctgtagactggacgaggctgtggagagaattagtgagcctgaagatacatcgatagaaacttcccaaaccgaaatgcaaagagaaaacaaaataataatagaaacaaaacagaatacccatgaagtgtgggaacatttcagaagatgtaaggtacatgcaattaaaatgcaaggagaaaaaagagaatgggggacaatatttgaggtagtaatagccaagaactttccaaaattaatggcatttatcaaactacaggcccaggaggttcagagaacaccaaaaagttacatctaagcatatcatatgcaaactgcagaaaaccagagatgaagagaaaattttgaaagaaggcagagatggggaaaaccttacctctagaggaagaaggatagaattgtaagcagacttctcatcagaaactatgcaaggaagaatagtcaagtgaaatatttaaagtgttgaatggggaaaagacaacttagacttccatatccagctaaaatatccttcaaaagtgaaggagaaataaagacttttgtaaataaaaactgagggaatgtgttgctctcagacctgctctgcaagaaattttctttagtcagaagaaaaatgacagatgtcagaaagctggatatacgtttttaaaaaaatcatcagagaagacaaatgaaaataaaatcttttatttttcttattcttcattaatctaaacaataacagattgtttaaagtaataatatcttagtctgcctaggctaccatgacaaaataccacaaactgggtgtcttaaacaacagaaatttattttcttgcagttctggagacttgaaagcccagcatcaagttccagctgactcattttctggtaaggactcttcttattcttactaggaaatgccagaagcaggaagcttcttgtcctcacatggcctgaccttggtgcattcatgtggagagagagaaaggagaggagctttctggaatttcttcttgtaaggacaccagtcctatcagatcagagacccatctttatgaccttatttaagctgaattgcctccttctaggccctacctacctaaaaacacaatcacaatggcggttagggttccaacatatgaatttgaggggacacaattcaatagcaaataataacattgtgttgggggattatagcatatggataagtgaaatgaatgaaaacaatgccacaagagataggaggaaggaattaggaatattctgatatgaaatagctgcattacacatgaagtgtaaatgtattattttaagacggacttaaattagttaaaaatgtatatagcaaactctacggcaaccactaaaaactgtttttaaagaagcatagttaatacactaagtgaggagataaaatggaatcatatgaaaggctaaattaaaaccagagaggcagaaaacattgcttctggcaacaaatagaaagcagttacaaacatggttgatattaatcaatgtatgtatcaataagcactttaaatgtgaatggtctaattacaccaattaaaaggcagagattgtcagaatgaataaaaaacaagactcaactacacattgtctatcggaaacaaagtttaaatataaagactctgataagttaagagtaaggaagtagagaaaaatataccgtgcaaaccaagaaagccagagcagctataataattttagacaaagtagacttcagaagatggaaaattatcagggattaaaaatgaatattatataatcataaaggggtcaattctccaagaagatatgataatcctaaatatgcaactagcaacagagcttcaaaatacgtgagtcaaaaacagatagaagtgaaagtagtcacagacaaatccactgttatagctagagatttcaacactgtcatgtcagttattgatagctcaagcaggaggaaaatcaataatgatgtagttgacataaatagcactatcagtcaacttgatctgattgacatatacagaatactccatccaacaaaagccaaatacacattcttctcaagcttacatggaacatgcaccaagatagaaaattttcttgcccataacacaccttaaaaagcttaaaagaacataaatcatataaaatatgcttccacaatgaaattaaactgcaaatccatactagaaagatagcttgaaaattccccaaatgtttggaacacatgtcaaagaagtctcaagataaattaagaaatattttgaactaagtgaaaatgaaagtacaacctatctaaatttgtgagatgcagcaaaggtagtgcttagaggaaaaattatagcattacatgtagattttagaaaagaaaaaagatttgaaattgataacccaagcttacatcataggaaattataggaagaatttaagcaaattaggcctaaagcaagcagaggaaaagaaataacaaaaattagggcaaaagtctatgaaaatttaaacagaaaagcaacagagaaaagcagtgaaaccaaaagctggttctttgaaaagatgaacaaaattgatagatttctagcctagctaatcaagaaaaaagagagagacacacacacacacacaaattgccaacattagaaatgaaacaagggtcatcactactgatcccacggacattgaaaagatgttaaaggaatactacaaacaactctatgtcagtgcccctcattttaatcatttagatgaaataaccaattgatggaaagacatggactaccaaaattcccacaagtagaaggagaccagctaaatagcccaatatctatctaattaattgaatcaatagttaataaccttcttaaaatgtaatcaccaggagcagatgactttaccgatgagtcttaccaaacatttaaggaaaaaaaataaaaattctctatgctctcatttagaaaacagaatcatcatgcccgtaatcccagtgctttggaaagccaaggtgggaggactgcttgaggccaggagtttgagacagcctgggtaagagagggagaccccatctgtaccaaaaaaaaaaaaaaaaaaaatttcaatttaaaaaaatagagtagaaatcagagaaaacacttcttgattcattctataagtccagaattaccctgacatcaaaaccatagaaagatattacaaaaagtaaagatgcacaccaatctatctgatgaatatagattagaatcttcaataaaagtgtctttgttcacaaatgacataattattgatgtataaaaactccaaaaactgtgcacaaacattagaaaattgaatccaacaatgtatttttaaaattatgccccaggtccaagtggaatttattccagatattcaaggctggttcaacactcaaatatcaattaatgtaatccaccaccatgactggcaaaaggggaacaattatgtaatataatcaaatgatccagaaaagcatttgacaatatccaatgtccatgataaagtttctcagcaaactaagaatagaggaaaactttgtcaacttaataaaaaaacaggctgggcatggtggctcatgcctgtaatcccactgctttgagaggctgaggcaagaggatcccttgaggcaaggagttcaagaccaccttcagcaacatagcaagaccccatctctacaaaaagtaaaaaaacagttagcagggtgtggtagcacaggcctgtagtcctagctactcaggaggctgaggcaggaaggtcactttgagaccagaagcttgaggttacagtgagctatgatattgccactgtactccaggctgggcaatagagtcagaccctatctcagaaaagaagaagaagaaagcagagtaaagagaagaaggaggagaaggaggacgaggaggacgaggaggaaagaaagaagaagaacatttacaaaaacctacacctaatattatacttaatgaggagaaacagatgcttttcccttaaggttggcaataagactgagatgtcccctctcaccactcttattcacctttatgccagaagtcctaggtagagcaataagacaggaaaagggaataaaagatataccgattgggaaggaaaaaataaaactgactttgttcatggatgacatgattgtctatgtagaaaatacaaaaacatggttgggtgcagtggctcacgcctgtaatcccagcactttgggaggccgatgcatgtggatcacaaggtcaggagattgagaccatcctggccaacatagtgaaaccccatctgttctaaaaatacaacaattagctgggtgtggtggcatgtgcctgtaatcccagcacactcaggaggctgaggcaggagaatcgcttgaaccagggagtcggaagttgcagtgagccaagattgtgccactgcactccagcctggtgacagagcgagactctgcctcaaaaaaaaaaaaaaaaagtttaccaaaaaatgcatagaattaattagtgatgatatcaagtttgcatgatacaatataaatagataaaagttgttttcctatatgccaccaacaataaagagttagactttagtaattaaaaacacactaccatctacaacagcatcaaaaaatctttaaaaagttaaactcatagagagtggaatgatggctaccagagtctgggaggtgaggagggagggaatggggagttgttaatcaaagggtacaaagtttcggctagacaggaggaataagttttgagatctactgcacagcagaatgactattgtcaataataatgtatatcttataacttaggaagtagacttcgaatgtcttaccttaaaagtgataggtaagtgaggtgatgaatatgttaattagcttgatttaatcattccacattgtatcgtataaatgtatacaattataatttgtcaattaaaaataaaataaataaataaaaatgaaaagatcagaagaattttttaaatagcaccaaaaaagtggaatacttaggtataagtcaaataaaatatgtacaggtcccgtatgtggaactaaaaatcaaacacctaagtaaatggacagatagtccatattcatggattgaaagactcaatattgttaagatgtcaatttttctgaattttttcctacagattcattgtaacactaatttaaaaatcaggaagctattttctgaatatcaagaaactgactctaaagtttatgtagaagcacaaaagatccaaaatagccaacatgacactaaagaagaagagcagacttcaagacttaaagctacagtaatcaagacagaatgatattggcaaaagaatagggacataactcattcgaacagaatagagagaccaaaaatagagtcacacaaatatagtcaactgatcttcagcaaagaaacaaaggcacttctaaggagaaagtatagtctcttcaacaaatggtgctggaacaattggacatccatatgcaaaaaaaaaaaaaaaaaaaaaatccagacacgaaccttacatccttcagaaaaattaactcaaaatgaatcacagacctaactataaaatggaccactataaaacttctagaagataacatggaagaaaatctaagtgacattgggtttagcaatgagtttttagataaaataccaaaagcataattcatgaaagaaaaaataataaattagactctttggtctaataataaattaacctcatgcctgtaatcccagcactttgggaggccgaggcgggcaaatcacaaggtcaggagttccagacaagcatgaacaacatggtgtaaccctgtctctaccaaaaatacaaaaattagccaggcatggtggcacacaccggctactcaggaggctgaggcaggagaatcacttgaacccgggaggcagaggttgtagtgagccgagatcgcaccactgcactccagcctgggcgacagagtgagactcagtctcaaaaaaaaaaaaaaattaaaaacctctgctcagtgaaagacattgttaaaacaatcaaaggcaagccacagacagggggaagatactataaaacacttacctgataaacgacttgtatccaaaacatagagttcttaaaacaataaggagacaaaccaaatgggtgaaagatctgaaaagacatctcattaacaaagatacacagatggcaaataagtatatgaaaagatgctcaacatcatatgtcaacaaagaattacaaattaaaacaacaatgagataccactatgcacctattagaacggctaacatccaaaacatactgataatattaaatgttgctggggacatgggacaacaggtctctcacacattgctgatgggcatgtataatgatacaaccattttggaaaataatttggcagtttcttataaaggtaaacatagtcttgccatattattcagcagtcatgctcctaggtattcacccatttgattttaaaacatatccacaaaaaaaaacctgcacacaaatgtttacagcattcaaatgtttataccatttatatttataactgccaaaaaccagaagtaaccaagatgtcctttgattggtgaatgaataaacaaaccatgaacatttgtaaaattgaatattattcactgatttaaaacatgaactattcagccataaaattacatagaggaaccattggtgcatttaataaacaaaaaaaaaagcaagtctttaaaggctacatactgtattattccaattatatgacattccggaaactgcaaaactgtagagacaataaaatgatcggtggttgcccaagagtttgggactggggagaggaatgaacaggtaaagcacagggaatttaggggtcagtaaaattaccctgtatgatgctataatgaagagtaaataatatacatttgtcaataccacagaacttttgagcacaaagagtaaactttaatgtgtgggaattttttaaaataactcatttaggatgtcagaagatttttggaatgaatgtgacaagggaaacgacctgtattacagatgaaacagcctcacagaagggagtagggaaataaggtgctgacctatgtaacactggaagtaagtggaatctgtaagactaaatgaaactgtacataagcagtgtattctacttgataaagttgtttcccactgaggtacaggttaggaattctgatgctgatatacatgtattctgtaattgaacaattaagtaaatgaatggtgaatggtgagatctcagtttcccattgttggagtgagaggttacagttaagcaagaagagcaaactagaacgatccatgtggtgatggattaaatgtggaggcatcaacgtgaactcatgtttagcttagtatggatacaggtggttacacacagaaatatttatagataagtgtatacacacacatatatctccttgctccatcagctgagatgacctagaagcaatgacaactcagtaacaataagcaataataagggaagggtggagagaaaataaacaagtaaacacacaaaaagcaattaatcatataatttttgcatagaagcgtggtaaggtaataaacaaagtgctgtgccaaaagcaaccagggacgaaaggcacaggagtaggctgctctgacaaggtggtcaaggaagccctccctagggaggtgatatttgagcagagctctgcataagacagagccagatgtgggaagatctgggcaaggggagggtagaacattctaggaagagataataagacatgcaaaggctctgaagcaagttccagtgctttcaattgaggattcaaggtcaagtgatttattgaagctgtgctgtcaggagttaccaggagcaatggcagcaaaagagaaaagagggagagccaagctgaggagtggcagcaaaagagaaaagagggagagccaagctgaggagtgattccaagtgaaatcccagcacagcctggaccctcagggagctctgggacataaattacaacccagagtttgttctgtctctaggtaaaggagctggatgtttgtagtcatacatcagtcagtcattggctatgggacagagttgaaaacagagttcaaggcaactgaagcagctacagcctatagatctgggcatcagaaatacgaaagcagtgcacatagaggccccaggacatacagtgatgcgtccttagttgagggataggcagtaggcctagctgaggtctaccaggtagtagctgttatgtggttgagagtggagatctatcagaggttgaacagtactggagatgcagttccggccctcaccaaagtagagaaatcttactaacatctcattaacacaccgggtatccagctgagagatcatgttattcttaagagtacgaaccacatcctagagtaggacctatttgagaacttgcctaacaaagcccaaaatcaagctctgacaaaaatctgcaggggatctgcagtgtttagaggtgaagttttactaaattagagaggcttgagaaacaccttaggctttgcacagactcataccagcaaagcataaaaccaaacctacaaaaagttcaagaagattgcctgccaaaacaaggatcaacactcttcagaggaagacaacagaatccagagtctataccctattgtttccacactctctgagattcaaccaaaaaccactggaaccacaaagaaagataaaaatgtaacccatagggcaaaaaaaaaaaaaaaaaaaaaaagaatctgtcaatagaaactgaaacaagatagtctagattttggacttagtagacaaaactttaaagcaacctttataaagatgttaaaagaattaaaataaaatatggccttaataacaaaccaaataggcaatctcaagagcaaaatgtaaattgtaaaaaaagagccaaatagaaattctagaacataaaacttcaattaaatttcaaattaaaacttcaaattaaaaatttgtcattcaacatgacagaagagttagtaaatgtgaagatggattaatttaaaaattatctaatctgaagaaaagagagaaaagggattgaagaaaaaaatcagagtctctgatctgtggtacaagatcacacagtctaacatatgtgtatctggtgtcccagaaggagaaaagaatgaggctagaacagcaaacatatttgaataaataatggttaaaaccttccaaagctgacagaaaatataaacgtatagatccaagaggctctgcaaaccccaagcaagatgaacacaaggagaaattcacatggtcacaccacagttaaacttttgaaaatgaaagacagaaacatcttgaaagcaatcagaagaaaacagagacttggggtttagggaaagaaggcttagaatgacactgacatctcatttggaaataatggaggctagaaaaacaatggaatgacatctttaaagtgctaaaagagaacatctctcagatttgtctacccaaagatctacctggagaattttttatccatcggctcccaacccccattgctggaggtttcccctggggtgttcactcccctgcacattcaggctgcacatgtgtgcttgatgggcaggttcccaccagtatttgcagcatccaagaatccctggggcggaggcattagttaaagctacatgggacacattgaggttagatgctaagatggtaaggtgagtcaaaatgttcatggaatccatggcaggcccagctgaaattataggagaggcggggctggggctactatcagccctactttgcaaaggtgaaaatgaatacaaagagtggttaaatcatacgccaagaccccacggctgataaatgctagagctgagtttaaactcagtctgtctggcatttaagctctcagacatacccccacactgactcttaagatgcaccgcacagtcattatcacacaggtatatacggcatgctcagacctctgcacatacacccaaggccactgtgttcacacacagagatgtttcactgcatgtgcactgccatgctattgcttttttttcttctttttcttttttttttttttttttttgagacagagtcttcctctgtctcccaggctggagtgcaacctccgcctcccaggttcaagagattctcctgcctcagcctcctgagtagctgggattacaggcacctgccacaacatccagctaatttttgtatttttagtagagatggggttttgccatgttggccaggctggtctcgaactcctgatctcaggcgatccgcccaccttggcctcccaaagtgctgggattacaggtgtgcaccaccgcacccggcctgccacactgtttctacagacacacattcgtgtacacacacacacacacacacacacacaaagccagggacatgtgcatgtctgtattcatgcatgaatatagcaaaagcattttcattagggaaacattccagctttttcctggctctgaagacaatgtaattgggcttgccacaggtggaagatgggagctactctgcccgcaggcagaaggcctccccactccctcttcctcccagcttgatgtggttagctaatcactgccaaggatgttattcacttccctcaggggcggcccctcacacagacctctcctttgtctcactcacccctggaaatctgcccacctccactctcagcctcacatgtactttcctgagatctccggctctgtctgtcaccagcacagtggggatgaaattcattattctaaactctcgagtctcagccacgctctggcagctggacgggtggcaagggaaatgccttactgctggcttcattgtttcacggaacttggtcatggtctcagaggtgcagcctcttttctcctgttggttccaccaaaaaaggggcctccagaggcagtccatgtgagctggacaagtgactgctcccaaaattccaaagccctcctttttccaattctttgtgagctatagcatgaagatggggattttgtcatgcatttattcagtgaacatatctgagcatctactgtgtaccaggcactggggttctagcagggtccatttatgttctttcactctcagtaccaagcccagtgcttggcatatggtaggtgcataatttacatttgttggatggatggatggattgatgacagacagatgaatgtatgaatgtgcagatggatggatggatgggtaggtggggaggtgggtggatggatgtgtggaataagctctacacagaagggtgtaggcttataaagaagatatagttgccatctcaaaggtgtccatcctctaggaagactttgcttatgccaccctatactgtagttacacaagtggaaggagcaagggatgggagtaggaagagagagttagggaggcaggtgttacatctggctggggcatttcaggcagaacattaggggaaacccttcccaaccacctcaagtccagcaggagaagcagtgcccatcccgacacttcatgaaaataatcagcccaagcgtccttgttaggggtgaccacagggcctcaggggcccctggggtgggccctgtcatcatctggttaggccaaggtgccttcagaacagcaatgcttcaaggtgtccaccgaggcagtgggtccactgtgctttagcaggtcacggcaggtggacacacttcagagtgcccacttcatcaggccaccccactgcagaatcctcagcccactgggcttcagcctccacatgccgcctttcagctcatgcatcatgcacccctcttccatgtgggcccctccttccccacctgcacacgtcctcagcaggtgcacaccaaatcaggtgctgtcagtgcctagacccacctaatcagatccagttccagcccaccctggacacagaaagccaggccagatccactgccttaaaatccagtctcatttttagtaactggaacactgaggcaggtgggtgcctcccagggccctcccgtgtcccggtagaatggctggagaccgagtgtccccatacatggatggcgcagccacattcagctgaggattggaacctgctcaaaatgtttgtttcctgtttaatcggtggtaataaaaagtcatggattccaaccaaaatacattccactccttcagccctggtttgtcaaaattgcttctctctgaagctccaacctcagggctgtgggagcctgtggttgactggcaggctgatcgcgcacaatatcatatcgggtcagaatcaccccattggcctccacctgccaaccttggaaagaaattcaaggtaaggacaagtgagtctaaaagtgcagctcttcctcccaatccctctcaaaactcaagttttgacttctgagctgtgaataaggatctcattgagccaaagttccttaaggttttttgctgcacccacaggggatcgtgtgcaggctaggagggttgccatggaacttcagcagccaaccacgaggaagggagggggagctgccgcccaagcagaggcccccacttctggctgggggcctgcctggccctccgcagccgtctccagcgctctcctctcatctggcccagttcaggcctgcgccaccagctgcagacagcctggcctcccggggtcccacccaccactcactcacctccatctcaggacagcccgtcttggcgccaccccaccctgtcccctgctcccctgttgcctccatgaccacatctttcctttcctacaacacacagagcaccgctagggcagggactaagatctttctcctctccctttggatttaactgacaaatgcgccttggatttctaagccgattccctgagggcttgtgccgcatgtataaatctgcagccaaaatgccagtgcccccaaactgtcagcttctttttttttcccctttaaagcaaactaatcttcctctgagctcctgtcttcaggaaatcagactgccacccttgtcaggggtgtcctgggatcggcgggagtaaggagccgggaaagctggcgtctaaggtacaattcaaccagctagctgtggatcctcaggcaagtaagttcacctctctgagtctgagtgtcctggtgtataaagtaggaatgattgtgcatgtacgcacacacatgcccgagataatgggttacagtgctttgtagtttgaggcagaggctcagtatgagctattgcgctaataattgcaacagaaaactgaggcgtattttcacatttctgttttgggttgtgtctcctctgtgttccctttccctccatacgtcttcttctgaaggtcaattccacaatcagttaccagaagtggcaagactgccggagctgtaatcccagctaagaagtggctggccatggctctgagtgacggcttcacaaacctcaccgcattccgttctatagcagtctctgagctgcgagccagggctctcaccatccccactagacagctgagcatactgagggtcagacggatgaaaggacgcgctcagcatgcgccactgctaagccgcagatgaaacccacactcagatccaggacgcaggagggaggagcggcacagaaagaaataggagctgccttcaggttcaaagcacaattgttttgcttttgtttttagacctcgtgcaaaatgaacaaaactcatccagaacgatgtccacaggcccctgatggctccccaggcctcactgaagcagggaagggtgagcatctcggtccacttcccctgagaatccaaattcctgtttcttttctttcttttttgtctttacttattccaaatatgttcaaaatggaactatgaaatgccatattttatccaaataagtaatttttaaaatgccatcttagaagagcttctaaacatttccaaaggcctttcaaactttctccctgaaaggctttgtaccaggcaaccaaatccttccggacttgttgaatgcggagagtgagagagccagtgagtggtgctggtgttgtctctttgcttcctccttcctcctccccccaccggcccccaccaatctgtccggtggatgctgagtgatcattttgcggatggcttggaacttggcttctcgaggggaagctggtatgagaaaatgagaatctcattcagatgggcttgcagtttttattcccctagcgaattattttcttatttccatcccccttgattcctttgcaaaaaactgcagccgtctttcctcccttctttgccttagttgaattaacttaattagggcacttgcttttgacaacgctgggagatttttagctaccgaactgtcctcaggagaccacaggaaggctgacgcactgtctgcaattatcaagctaatcactcagaacacactcgtttgttttatgtatttatatcttgggatataaaccttcatttccatttttctttcgttctgctgtgtgtgccaggcagagtgaggcactgtgggcaagagaagagccctgcccttatggagagcagctggccagacagacattaaacacatgataatacacagaaacatgtgattacagggagtgaagaatgcaacaaagaaataatactttgaaatatcgccttctctttctggacttctttggaatacagccagtcagagcatagctctaagaccaagagtaagcaatgccttttgaaatattctgtttgaaatcagagcccttccccactgcagtcaattgcgggcacaaatattccttttgttcacagaccacatcctgtgttccccagggcctcaccctgagctgatcccaggatgacctagaagaggcatgttttactgaaatcgtttctaaaacttacactaaagctacaatatctgaacgcatggtaaggacacacattttcaagtttctctttgggtcacaggtgtgctgctttctacatcaatttgtcaggaagacaaatcttttagtgtcgggaagaaaagcagcaagatgaaaaagaaaaaaaaaagaagatatttcaagatcagattcttcatcctacttttctgacttgccagaagctaacgacatctttcctagcagtgactggcaaccactctgaaaacttcaccaaattattactcctttatttttttgaaaaaacaggcaagtgtatttagttgtcattggttacaaccaaatttctctaaatatttcagtgcatctcaaaatactatattgataagttcaagtcataaaaaactgcattaggagttttggaaaatttactggtaggattatgcatgtttttcttccatttgagttctcctctgaatgcatgtttatttaaagaaaaattgtggtatttggaagattgaagactgacttctaaactgtgctgacttcaggaagacctacttttggccaggcacagaggctcatgcctgtaatcccagcaccttgggaggctgaggagggaggattgcttgagcccaggagttcaagacaagcctaggtaacacagcaagaaaaatgttgaaattagctgagtatggtgggtcatgcctgtagtcgcagctacttggaaagctgagacaggagaatggcttgaaccagagaggtggaggctgcagtgagctatgatcatgcccctgcactccagactgggtaacagagtgagaccccatctccaaaaaaaaagaagacctgcttttttctccttctatccagtcccatcgaattaactgttcttggaaaggagggcacatcccaaactggggggtcacaaggtgatttgtgaggtacacgtagcatcaaaaccacagatacacacgctgacagagctattcctttttagtcctttgcttggcccaggagagtccccagtggggactagtcaattttcagcacctccccagtgctgccaccaccctttttaatagagagagtgagcagctacagcaccaaactggaatttcgtaacatcagctttcattatttttatgaccattgccttccacataggtcaaatggcactggtttttcacttatggtcatgacttgaagcttcctttttaaaataactgtatgttttcaaaagtgtgtaaatgtaaaagaaaggattaagtaaataatggcacgatatggcaggtgagatgcaaatggcaggtttggggaaaagggcaatcgataaaaataaaggcagcttggctctcccgctctcccagcgctgcagctcagaggaaaactaaaattaattccttttgcagcatgacggggaaaaaaagcatccagaaggaaattcatcaaaccattaaaagtgatctcccccagggaaggggcttgcaggcagggggaacacattcacatttcgctttaaacacatctggattatttgaatttttgtattgcatagaagttaaccctttgtctgacttcttggttataaatgtttttcttggaatgccttttgtttattgcctttgtgatctcttgggcaggcaaaacttctcaacttcataaaataaaataaaaaatccatcttttctttatagcttctgggtttccagtctccctggcccctagattgtaactgcagtatcacacatttcttgcaatactattatgattattgtgttacttgtaagtatttaattcctctagagttgatttctgtatccatggaccattggttccattttcatgttctcccatttgtcaaagggttcatccatcctcctgtcttgaacatcagctctctccgtatataccttctgagttataaggacagttccacttcacttcctgcttcactaatctagtccctgtcacgacaccaaaactgacttggttacaggacctttagagcctatactaatacctggataggtaaatcctccatcactcttctcattttccacatttcctagctattctgagggcatctcttcttccataggaactctaagattatatttttatttgagtatgcattatttcaataatttaaaaaataaaatattttattattaaaaaggtggccaggtgtggtggcttatgcctgtaactccagcactttgggaggccaagtcgggtggatcacttgaggtcaggagttcgagaccaacctggccaacatggcgaaaccctgtgtctactaaaaatacaaaaattagctgggtgtggtggcgagcgcctgtaattccagctactcaggaggctgaggcaagagaattgcttgaacctgggaggcggaggttgcagtgagccgagattgtgccactacactccagcctgggcgacagagcgagactctgtctttaaaaaaaaaaaaaaaaaaactccttgtccaaaaaaaaaaaaaagtggggggaggcggcaccaccagatgctggtgaggattggagtaccgagagctctcacccctggttggtgggaatgcaaaatggtgcagccactttggaagacagtttcacagcttcttgcaaagttacacatattctttccataccacacagcaattgtgctccctgatatttacccagaggatttgtttagagcagctttcatcataattgccaaaacttagaatccaccgcgatgtccttgggttggtgaatggatgaactgtagtacatccaggcactggaattttattcagtactaagaaaggaacaagctatcgagataggaaaagatgtggaggaaaccgacggcatgttactaagtgaaagaagtcagtctgaaaagcacacactgtatggttccaactctatggccacactaaggaggcacaaaacaaagaaaagatgcgcaaaagacaaaaacaaacacaattagggaggcgagtgtcccgctctggtgggggatgttgatagtgagggaggccgtgcctgtgtggaggcagggggtttatggaaaatctctgcaccttctactcagttttgctgtgaacttgaaactgctcttaaaaaaataaggtcttttttttaaagggagggagggatcttttaaattgtctctttcttgtatatcaaaagctaagctatgccagcatctgaaacagaaagtggctgagggtacctctgtcacttggacctcttctgctcacagcctccctgaactggtggccagggaaggcagtgggaggagaggaccaagtctcaaactccagaagccccacctccctgagctcagcaactctgccaagccccctcaggtaagccagcagggaggcggtgggggctctatagagtgagcacttctcagccagttacctggctaggagcccagcaattcttgctagaaccccgcggatgtggtgccagtttgaataagagtcagctctggctgattcttgcagacaaagtgaggtggagctctctctttgagcgttctactatgcacaggactgcaggtgggaaatcgctgtcaggaaggacagagggaggaaaacgttgacagcgcagataaaaggggtcaagttcacgggactttgaccatgtcccaggcattgtgctgtgcctgcactcctgtcatccccccattctacagacaactattcagagagattaattctttcacccatgaccacccagcttacgggggcacttggagctcacctgtcggctccaaccccttctcactgctcagtgcaagagtaaggcaatacactgccggccccaccctggaggaaaatactcggctctgaatctgcacctctcccaagtaggtatttacaaacaaaagaactcagcgctcccggccgtgagtgttgcaaatacatacacaaaaatgactgagcctgattcatcatttgagaaccaaaggggataaggctgcattaactatgagagtttgcgtcttccagcagacaaaacaaaaaatgagagccactctttctaaatgtttttgtatccaacccagttccttccaattttttgccattgtttaaaagatgttgaagcttccaagtgcacagctcaggaaagttttcatcatgtctcatcctgtgtgttgcagcgcgaagtcctcgtccagagaaggcaacggcgagaaacaaatccaacatcctgggctgctttttccttcccccactttttaaaagtttggtgtccaagtcacttgacaaacccagaccctaacaatgacattttgtgtagaattctgggatcaaaatataatttcaaaaataatatattttctgacatcccccaagaaaaaaagtactggtttcttccccctaaaaggatttagatggaataacatctgtgctgagaatattgtgaatatgttgaactgacaggcagtctctaaggcactccgctcattaatgtgctgtgcataaaattaaaacttgaaatatatttttaaatccattttgaatcatttaagcaaagaaactattgtgctgaaataatatatttggagcaaggaatatgaaagctattaaaatgtcttagacctcctgcctttcatgggagaggaagaaggggggaaatgctctctctgatttgaaacaggctttgcataaaatatacccaccccacctcaccatctcccaaaaaaaaaatctactctgaagtaacactaagagtttcacttaaatccacaggagccaaggaacacgaagttgggtctttatatttctcctgcttccactgtgcatagctgagctggggagcagctcaatgagggctgtgagggcccaggtatggtgggcaccttccctgggtctgcagcattcacggctgtgagcaagaaaccctaaaggagggaggaagggaagacaaagacacaaagatagggccttgttttgctcccgccttgtcctgatttctgcaaacattttgaacactcaggatgccaattaattcgtgggttctttggagcccgttggcatgagtgtgtgctgggaacagcagcctgacaattccccaacaacccccgttctctcactcgttgtctcattcatctgtctatcaaatatgtgttgagtgccaaccaagagccatcactgtcctggattctgagagttcagtgttgcgaaaactcaactgtgaaaacctgctaggaaggcacgctgtcggaagaggacagggtggcaccaagaaatggggtgggcatctggcctggtctgggaaggcttcctggaggaagtgacagcagagttgtattctaagggaagaggaagaaacggagagtgtacgccaggcatgggggtggcaagtgcaaaggcgctgaggtgggaatttgcctgaagtgtttcctagatgggaaggcggccagtgtggcaggagcacagattgtgaggaggggctgagagagtggaagggagagtcaaggtaaatgggtcagcccaggtagggcctgtgtccaccatgagaagcctcgcccttaccctaagagcaaacacgttgccctcagcaagcacaggcagctcatgactgtccagccctctctgccaggtggagggcagtggaaggggttgtgcatccatgcagggctgggtggaagctgaccaggttagggagggggtatgaactcgctacttcccacgccagtgcctatgtccatggttccctctgccagggcctccatcctcctagtccccatcctttgtgtctcagatacagcagcacgtccccttgaccactcagctgtgccaggacagggcagatcttcaaggaagctctgtgcccctccttcaatgcccatgtggaactggacaccaccttccaccccgcaggccgggagcccctggagtctcaggctggggcatatataccaccattccctcatcaccccctgtaccccatggggcccaccacccactggggctgacagaaagaaagattcgtaacaatgggaccatgttaacttgcttgctgctgtacatgcacatgtgacactcacaaatatttgtgaatgaatgcgtgaatcaatgaaaggatgaatgaatgaatttcactgtgaactgaactaaactggacaaagcacagagttgtgcacctttaaagcttccagaacagatgacagcgaggatgtctgacacttctctggttaggaagctgaggttctaggagactgccaagttgccagagccacctgtgatcacctgaccacacctgcagcaccacaagcaccacgcattccctctctgtggcccaattcttcatgcacctgctatcaccaacctccaatctccagcacctcccacagggtcttgtcctctatcgtccccacttccctgccactaagaccctgaaactcactgtcaccactagcagcccattgagagagagattcagtcacagcccaggagggtgcccagaaatccaccgtgaggttgcagcaacgtgatttggcagaagagcaaggagtgggagagatcggagatgccctcctgggccagtgaggcaactggctagggtgggtgcctttacactgtagaggcaggttccctgtgctcaccagacctgggtgaaccctttatttcactgattttaaaatacacgttatttcacaatttaacttctctgagattgagatgcaactcatgactgattgatggatattgggtttaaaggcccaagtgatgacagacacctggatggcctgggaggttcactttctccctctttttcgaggtgagtaaggagctagctccacacgactgagttgtctccagggaaaacagactgataccagctgctgggcacgaggccgcctgctctacaaggtcactaattgtggattagacaccccttggcctccatccctatgtgtgggtagagcattacagggcaggatcctctgcctgagccctttctgaggtgctccacatccagctgtgcccagccctgcacacctcccatgcagcagcaggagctcagggatcatgtgtgcctggctacttctccaccaagtcttcctgcagcaaagtcaacttcaagtgcactaatatgcaagccccctttccacgccatggtatttttatggtacataaggcaatagtgtttaataaccgaagacattttagattttattataggcagtaatcagctgtcctgggccagtagcacagccatcttgtttcctcatctgctttatgggataatgtccaccttggattcattttaaaactccagagtattgcaggtgcacgatgctggcacatagtaagtgcccaaccaatattgacgatcctggatgaagaacccttggctcttctttaacttgggctgcagcaattaaaatttgcaatcctgtatagaaaatgccaatgcttttttctagtctttcccggaatttttttctgaaatccctgtatcctggggaagctctgcagagaaataatgtctgccattttacaagtaaaatgaatgacataagagagcccagtgcaaattgagatgctttctgcaccaggctgggcaggttcctaggaagagtcgcaacattccaggcagatatttccgggaagatccccaaggcaggtgaaatctcagagtcctgcgtaattttcccttggcaacagtcatgcatttctcccctaacatctccatctttcagtctttctctccttcctatttctaatatttgtaccttcagggaaggcccattcgtgaaacataacccatgcacttcacatgcatgaggcttggtgaggacgtggccctctctgttcaggaagatgctaccaccctcccgtggcacgggttggtctctgtcctaagacgtttcatgtgccgagtcgctggctcctccctgagccctgaggtgggtaccattatcatgcccacgttatggggacaaccgaggttgaaagagactagggggctggcctgagtgctcgcagccaggggctggcagggctgggatatggagccaggttcgtgaggctgaaggaccccaccctggagccatcaaaccatactcagcccctcctccacgctgcaccctcagctcctgggggaggtcggagtgtattgagccaggacagtcccagtcatggagtttgtctaaccattcacaggctgctcacatccctcccagagcctgttatgctgggcgtttggtttgtatgttttgtttgaggtctcctccctcaaggaagatttgctggatttagaaacctggaccaggggccccttctcactgtgcccatgagattctgtccaggcactcagcagtctgtactgtgggtgttagtatccgtgtgtgcccctgaattggtttgctagggctgccctaacacattaacacaaactgaatggctcaaaacaacagagatttcttccctcacattcgtggggctggaagtacaaaatccagccttcagcagggccgtgctccctccagagcctccaggggaagatccttcccaccctcttccagcttctgggggttgccggcaatccttggcttgtggcagactcactccaatctccgcttccatctgtacatggccttcttccctgtgtgtttgtgtctctgtgtctgcacatggtctcctcataaagacatgttattgggttaggaacctgataatccagtattacctcattttaatttaactaattacatctgcaaagatcctatttccaaataagatcacactcacaagttccaggtggacaggagttgggggaggggcgccattcaacccagtccacccccttataagataattgccttttgagagcagagctggtgctgattaatctatgttggctgtcactaagtgtctgataaataattggatacatgcgtgcattgagcttagaagtgctgactcttactagcaaatgtcacaagactgaaacctgcccagcctgtgagtgcctttaacaccaagagggaatctttgctcccctcctaggtctctctgtaagctggcagcagaaatatccacccccaccccgggactgctgtgagtgttgaatataatgtgcaggggttctcaagaggtttgggggagaattttagaaatgctggggtagggagctgtttggggattatcacaatgctagcaccacttggtgtgcaagggaaaaggctttcccacaacatacaaggcagtcaggaccccaaagcaaagtccccaccccaaggacttgggaataacccactggatgtgcctgtcagtgaacatcctgcttcacattatctaagcctggaaccaccttccctttcacacagaagtacaaggtcttctcacacataaaaatccacaatgtttcccgtgccactttatttggctttagtttctctgaaataaaactgctggatgcattcagtgaaaaccaagagtcgtttcacaaaatcacatcaccaacagcaatgtcactgtggtagctgagtggccaatatgctctactctgagtcaacagcatctggggtggcacagtgtcagggtggcacagtcacgaggtggcacagtctggggggtggcacagtcaggaggatcccacccacaggcctggccacctgcccaccccccttgtctcgtaatgcagcaaagcctggaggattccatccccatcattctatttccttagtttatattactttcctcttatttctccttgatttcctagctagggcattatattatctctgaatgtcatcacaagacagtgaaggggatgatacaaaatatctgttctaaagcaggagcaccagcatggccagggcagagagccacctggacaatgagtgacaactggcaatccccacctggctcggcagctgggctcccgcgggggcatcctgtttatttgggcatcctgatgagagaccagagccaggagcagtgggacccaagggtcctttgagcccaggtccttcactggggccaaacaagaaccaaggagatggagctgccttcccggagcacacagtcacatagggacaggagtggggctcaggtggggctgcccctcatcccgtcaagcagaggcctcaaggacaacaggggaccctgtgatccccaggaactcaaggtcagtcttgaagagtaaggaccatgtggacgtaaaatgggttttgggaagaaccagcaaagggccagaggcaggctgagcctcccacactggatggggagtgggctggacaattgagttgaatggccaggttgtctcagtgcccccaaggacagccctgagcccaggtttccacaggcccccagcacaatgaactcaccagcaaaacatcttctgcattcaacccaaaagaaaaaaaatatattcctgtaaaacctgttctgattacggccagcgtgataaagctgattgtcccaggagataaaagcaaaattgcacagggtcaccccttttccctgaacaaggcgcagtgaacgcatcgcaccgtgacagggtcttaaatacgagataaagtggaagtgacagctgagttacaggcaaacgagagccagatcattgcgcatctataaatcagggaaacccacctcaggcagagccacggagtcattctgctttaatccagtccaaacgttgtggtgtctgccccgacccttgggaggctccactcgtggcatccaggcccagcccctggtcccacctcagagccacctgtgacatggattccaccccccgccaacatccccaggcctccacaccccagcagcacaggtttgcctgccgcaccttggtcgtctcttcaggaaccaacatgcctcactctggatccatgtggctggagtggccatggggccccagactgcccgtcagcttctgtcctctgaccatggtgaccacggtggcacgtgacccacaacagtgcagtcggcgcaaaccctgagacatgcggaggagcaacggggaggacaacaacctccatccaacctggaggtccagatgccctcagtcatcaacaagactaatgtcaagtatgcctggaatatatctgtctaggccccttagatggatagtggacaggaatgtgtcatttcccaaaaaacagtctcaacaatttgaatgattataaagacagtgaatggcattgctattttctgtgttttcccactctctctctctgagacttgagtgaaacgtatttcaaatgaaaatttgtgggtatttgttaagggcctactgtatgcctagctccctgtgtggtgtaggtcggcacacagagtgacctgcctgagatgggccaatgcaggggagcacagagtcaagaagatctggttctgatggcaatccttgaacccctggatgcagccttatctgaagcctctaggctcttcaaacatgagagctaaataatcccctgtcttcatgcaaagctgatttgagctgactctctaaccctttcaggtaagatagtcctggctgacacattctcctcatttctcccataccccctgtatctttctctccaacccaaatgctacttctgtggcctgggcctcatcaccacacatctagacatcagcaaaccccctcctaggccccaacctccagtgttgcttcccagcccattctccaggccagaggcacatacatagaacaggtcatagtgtgcccctcccagaccaaagccattcaaaggcacccagttaggacaaaggcccagctgataagcaggacaaatgtagggttcttatattcatcagggggtctttgggagactccagcagcaggcttcctttcttcttggagattccaaacttcctctgatccaggaggacttgcaacttccttgggtatgtctaggtgaccccaagagcttggagctcaggacatctcttctatcatggacagtgtcaaggcatcacaaaaattttacaaacccaagaatctcaacttgctcactctctccttttttctctctcccaatcacagagggaaaaaaaaaaaaaaacgcaggtcagcgaggccgactgcagatcacagccccttaactctgtacctgctgaagtccccccagattcccatcccagcacccccgctaatcctctgcaatgattagacggtcaggaactgggagccgtcgcagctgcgattctcattaactgagtttaaaagacctggcacgtacagagctcctctgtaatcacagtgccagcaaatctctgaaataatagatatttccaacttagccttctggatttcatagagcccccaagctttcatttaaaatccattttatatgaagttatctgaaaatgaacaataggagtctcaaagagatgtctccccagacaccggtgtgaaggctgctgaaagagatcaatccacaaatccatttgccttttagataaaacacacagggtcccagtgggcttgtctccacgtccatgataggaaaagagctctccttgccatgaagatggagaccacagttcttaaccacttatgccatttcatgtcctgggtgaagtgtccatcctcagaatggatagaatagccttcactggacaaagcagggcccactatgtgctgagcactctccaggtggcagggtctggaaggaagagtgagactttgaccccagaccatccactcggggacagccttgcccgttgttcactctgtgtgccgacctacaccacacagggagctaggcacacagtaggcccttaacaaatacccacacattttcatctgaaatacctttcactcaaatctgagagagagagagtaggaaaacacagaaaatagcaatgccattcactgtctttataatcattcaaattgttgagactgttttttgggaaatgatacattcctgtccactatccatctaaggggcctagacagatatagtccaggcatacttgaaattagtcttgttgatgactaagggcatctggaccttggtttccatctttatagctgtgtgaccatgagcaagtggctcaacttctctgattctgtatctgcctctgcaaaataagaatgatcatagtctacatcattgggctattatggggatgaaatgcaatgatgcttgggaaatacttattggaagtgcttaataaatttcagctattacttctgctactgtcatcatcagattgacagctcaaccatgtacacagtagtacaagtttccctagtgccacccagttgagtaaacgaatgaacgggtgttgtaattttatggaaaaaacctccttccacctgcttctacccaatgatccagttttccttccaaaccctctgtctgaccctccatgggccacagagtcctccccattgccatcccagttaagtaaaatggtctggaatcctagagaattactgcacttaaattcccagtcaagttcagtatttgtgactgaaacctacatctaacccttcagaagccaaagctccattccccaactgtccacatttccagccaggctccttcccaggcatggaaacttcagggcagatggaaacgggctgcccattgccaaagctcagaataccctctccgccttcaccactaatggcgcctgaagagggctcccaggcatttcccaccttaaatggccaggaccactgagtgggattcacacttggaaatctaagttggttcttttcccctggcgtcagctgactatctcttcacacaggggttgggcttttctcacctcccaagagctggcttgagagatgtcaggaggagagagggggatgaaatccaccctcagcttggtgcgcagcctctcattggagcagcattggataattaggccaaatagagggcagacttacgagggagcttcctgggtgcagcaggaggggtgcagctttgttcttcttcagtaagacccagagagtgatgctaattgttactttaggtgtgtggagtggagactatttgtgaagcaggaggggagttcgtgggctgtgactaaagagggcataatgagtgtgaaaagagaagaacctctgggtcccttaagctgaagctcagttaagccatccaatacattccctacaaattggcactttcagctccagcctccatgcttttgttgtgcagttgaggtaatgatcacccgtgctgtgagaaaggcatgcaggctggcagaaaccactcatggcacaaagcattctttggtttaaaaaaaaaatcataaaataaaaaagaaagctgtttaagcttaaaaactaaaaaagaagcggttggctccagttgtcgacatgttttataaagcaacagcaaaatgaaaaaaataaaaaataaactgtcccagagaactgagagagggccaaaaatattaatacacgggaacatggcgaaccttctacaagctgtaaatattttcctagtttcccacgtgtagtcagcaagtacggcagttctttttctctctccactcttcctgttggaaatctatgtggaataacaattttgccagaaaaaaaaaatatattaggttgaagaaattgtgtctgccagggactcatgaattggtttcatatatcagagggagggggtttcaacccccagagcgaggaaaatggaggaggatatacaaaacaaagaaaaagaccaccagagcttaaaactaaaaatagagtttgatgtatgtgaatgtcttaacttgccgagcatggggcacggaccagtgaagaaactcactgagggtggggtggcaccgaaggttcaagatgcccagatcaatttgaatcgagtgatttctcagtagaagtacagtacacccccatgcaaacttgagtttaactgggcatcctgtatttttatttgctgaatcgggccataccgctgagtgggagaggcatttcagtggttggaagaggggctcctggtggttctgctaacgaaggattgataacgcacatcctgattggacagagcgagcttgtgggtccgttcatagttggttgaaacaaggaaggagtctcaggggagacccaggaggtgggcgtctcagggtgtctaagtctgcgtgtcagctgtagtgacatatggcaggttctatgtgaccccaacagtgctgccaaaaggggaaactttgccttttacagacaccacctcagaaaaagctggacctgcactgcttcctcaaccctcacgtactgctgagattcacagccatgcttcagccttgaaagtcatctcggaagataaagccatcttccctggttacgagagagaggaagactcagaaatgtctgctccccatcttcctcaggagttctgcccctaggaaggaaggaagaagagctgccctccaaggccagggttcctcactgagccagttctcccttctgcaaaatggtcacaaagccctctgcaaggggttgctgtgaccatctgtatgagatcattctcacattgctacaaagaaatccctgagactgggtaatttataaagaaaagaggtttcattggctcagttttgcaggctgtacaagaagtataatgctggcatctgcttggcttctggggaggcctcaggaagctgcaatcacagcagaaggcaaaggggaagtaagtacatcacagaccagatcaggagcaagggccgggggaggggccacacacttttaaacaaccagatctcgcgggaactcactcgtgatcgcaatgacaatacccaggggaaggtgccaaaccattcatgagaaattcacccccatgatccaattacctcctatcaggccccacctccaacactggggattagaattcaacataagacttgcagggaatacagatccagaccatctcaccatcaaatcagagcatgcagggaagtgccccacgggggctggggaatgctggtgccctgagggtgaccaggacagcctcagactcagggcagagcccagaggagcagtccctggtgagtgcagctctgggtcctctctcacctcttgagaaaggggaacccagccttccctggggacagcctccagccaccggccatccacagcctctccttcaacactgtcatcctcaagaagcaaaccccacttccacccaaagccacatttccatctccccacgccttcccccaaatcgtagtgtcttagattgagggaactgcctgcacgctgacaacaaatgtgataaaccaggagtgaagccctccattgtttgggagccccgctgtcaggctcccgcagagctctctgcctttgctcctctcagcctctgcagatccctaaaattgggaggtgtagtcatgatccccttttccagatgaggaaatgggggctcagagttgttaagcaatatgcacaaggtcactgagatggcacacagcaaacccgagacctgagctacgtcggatcccaaaacccagacatttatccggtactctacccatttctagtcctggacccaggctaccccgtgcagatattgccaaggagaatggagaagactagcaaactcttattcatccttgaaaacccaactcactcatcacctcctctgtcctcttctgtctcatctggggctggctctgaatcacatataccctatgtcatttcgtatataaggctgcgttatcatttagttgcattcacatctgcttacctgctagattgaactcctgggggacgcatagtgcctgcttctccatttctgcacccatttcatttccatggaaccctccagctgcaccggccccctttgcattcttcaaacaccccatgctgctcctgcctcgggaactatactccacaccacccgctctgtgggaaattcttctgatcttccacaccagatctgcacccacatgtctcctcctcagagagacctgccctgaccgcctgtttaacacagccccacagcccctggcctgtccctgcccccactggcctcatgccctggtgtgactctcttcctagcacgtcatgcctctctccctggcaccaggtcacacgtgcatttgtttcctggcttcattatctgtcttcccactcgatgtgccagctccagggaagcagagaccttgcaggtctgactccctcctggcaccagacacatcaaaagctctcaacacacgtccataggatgaaggaaccctcgatgtctggcactgttaatgaatttagtcttaattaatcatcttaacagaaatgtctcaaaacctcccaaggaggaaagcagaatttgttcttactacataatggatctttcttcctagccatccacttatttcctcccagaatatcttcccctctgttgtaagaatggagaccttggagaacagtccaggaagaaaatcccagcttcctgcctagagatctgtccaccctcttgctagcccactagcttgcagttggctcagccgtggacctgggatgttatatattcattaattaatcaattcagctccgatgccagcctctgcttgcccactcactaatccagctgagggacagttgggaccaccctaatactgggcgtgggccaggcatttccaacagccaagaaaagcaccatgtgctatgaagggaaaacacactagctgagctcccctctaaacaccacacataagtacaaatctgttgataagggaagaggccatggagatggactagggagagtctcagatacctaactggtggatacacacactggcatcctcccagaccagtgccctggtaattatctaggaggtgacctgtagctcaactgagtcatgcttcctcctctctcagtcccccgaggcaggctctggacacctgctcatctcatggctgctcagccagaaaaatgtcctcctacatcgtgtagatgatccccttgctgttgtctcagagccattttccagctctgggtccacaacaatgggggtatggtagaaacctagggggtcaatgaatcagtcaaaaaacactggctgagcaccccagcgatagagtgattactgcctataggcagggaaaaagagtgtggggtggtggggtctggaggtaacattatccgtgaatttcatttagggattgttacaaagagtggacgccaaccaaaacgcatattttctccaaagacatgtgcagtaatattttagcagcacttttgtggtggccaaaaactcaatgcaacgcccatcagcaaatactgttcaggagcagaaatggacgctagggccactcacagcaacggggatgctctctcaatcatgacactgggcaaaggcagccaggcacaaaggagaacatctggatggttccactcacacaaagttcaaatcacagcaaagctaatctttgcagagggaagtcaatgagagccagggaggacggtgaccctgggggccactgggggaggctggcaatgctttgttttctaatctccaggtgacggttacaggcgagtcctctctttgacatactcaattaagctctgtacacttgagcgtctgtccactcgtaggtgtgcatacttccactgcggatttaaactttcaaagaagtctagggtgttaggtctggaggtttccccaaggttttccacagatgagcaaatgggcctagaggtggacaaagggcccagacgtgagcaaaggatggcagcaagcccggacccaagcgacgcggcgaaagcacagcgaccccaccctcgccaggtgcagagccatttccgcctccgagtcctgcgttgcctggcaaccggtctcccaggagacgcgagacgctgagcccagggccagagcttgcggggcgcacagagcccccaggcctcatggcgcagaaacctctcagcaccgcggcggctgaacgcatgaaccttgtgggtcaggatgagatctggtaacgcctgggatcgggcaacgcggtgggctcctgttctcacctgaagtgtccacatctggggtctcagtttccccaccaagtccgggaagtgatcgaccactaaactcgaggggcagaggggcgtgcgctgaggatggtcaggggccttgaggaaaggggtcaatgttagggacatgagagcgacaggagggcctttctccgtctccttctccctctcctgttgggcccaccacgaagacgtgggagattggctttcaacaatcagcagagattggcttgttgaaatccaactaacatgttcatgttttttttttttcttcaaatctcagcatccaaccagaacgtgttcatgtttttaagactgatgatttttgtttgtttgtttgtttgttttttgagatggagtcctgctctatcctccaggctggagtgcagtggcgcgatctcggctcactgcaacctctgcctcctgggttcaagcaattctctgcctcagcttcccgagtagctgggattacaggcgcccaccaccacacccggctaatgtttttgtatttttagtagagacgggctttcaccatcttggccaggcaggtcttgaattcctgacgtcgtgatccacccgcctcggcctcccaaagtgttaggattgcatgcgtgagtcaccgcgcctggccaaatttttttttaaaaaaagaaagcaaaaatcctaatatttgttaaatttgaatgaagtacatgaaaatcccttgattctcctgggtttttaagtaatatattttaactttaaagatacatccattttctaaaagatgtatgtctagcagacatttgtcgtggatattttaattggcatgctatctgctacgtattattgcatctctttgaaagtttaactcatatgggaatttacagatttagatataagtaagttgtagtaacaataaaacatacttgtttaccttctaaacttcagttatcctatttaccctctctataatttttaccatttccttgtaaaacctctattagtcacttcatatgtgtctttaaattgttttcacttgatgattttatggaaaacttcatatcactctcataaatagaaaacctttatcatttggcataaaatacacaactattttttactaaatctttatccaagtgtcccaataggagatgctgccacagcaggatctgttccctctgtctgaaatgccccttcctctcttcttcaccatacaaacttctgctcatccttcaagacccaaatctaagtgacccctcctctttgaatagggcccttggctacctaacacttaaattgtaactggtccaaattgggttcagccgttaagtgtaaactgcgtgacaaattacgatgatttatttaaaaaaaaaaaagattatttaagtgactgtcagccggatgcagtggctcacacctgtaatcccagcactttgggaggccgaggccaggagttgaagaccagcctggccaacatggtgaaaccccatctctactaaaaatacaaaattatccaggcatggtggcacacacctgtaatcccagctactcaggaggctgaggcaggagaattgcttgaacccaggaggcggaggttgcagtgaacctagattgtgccatcgcactccatcctaggcaaaaaaaaggcgaaactccatcaaaaaaaaaaaaaaaaaaaaaaagactgtcacctgtttattcttatgttctttttaatgtagttactagaacatttcaaattgtgtatgcagctcatgtttgtggcttatgttacatcttgattgaaatagactctgccttagatgctcactgcccagggcaaagagttgaccagggtctccgaaactgtggggtagggatatgctgatattgattccaagatagaagaaactagaaaactcaaaacgattgaatgtttaatttgatgtttgcaaaatgtggcacgtgggctcgtctactgcaatgccactcagctcatgggtagttagatataaacaatattagcatggagcaaaagcaaggtcggattagggtggggcaagtgaggcacttgcgctgcaatatttaggaaatgctccacgtcaaggtcatgcagacgctgtctctgcacttgcaggaagcagggagtgagtgcctcctccacttttgcacctcctcaaattttgagtcataagggcctccaaaataagagatctggtacctagaaggctcctcaggcagaatcggcccccagactggcccttacccggcattccctctcagccgtaacagccaaccagcatctctctttcgttagccacgtgtctcccttgctggtgggaggtgctcagcatcagaggttctcacgctgtctggctcctcactccgtccctggtgcagaaccactgcccagtcaatgttcgtggagaatggaaatgtcccccacagaccccttgaacctttttccgtgttgcccagcactcaggaactttctttttcaggaaataccgtctgaaggctgaatcggaagcacggcagaactggccccagaactgggggtttttaacaaccccttttgaggaggtaaatataaattgtatgagccccaaggttacagaatcaatcatttcaaagaatgaatgattacaaagtctatcacttgcaagaataaaactaaagagcatgttgtaggcaaagatcactaactcctaaaccagaaggttcccgcctttcacagattcctgggcactgaccacatgccaggcatgttctaggtgcttcggcagaaccagatgatcaaatctggacaagaaccccggtgcagagacaggtgttgttttatgcccatttacaaattaggaaattgagctccaagacctgcaaagtcacacaactgataaggaccctactcaggtgagaagcaggtgggtctgatgccacagccacctgacctcagacttcccatctgtaaagtgggatgagagtcctcacctgcctaactgagcgactgtgaggtgcagatacaagaaggctatggacacctcacctggcctggaggccaagtgacatatgagggattcttgggaaaatgctgtcggtattccctaaagatgacaagtccagaagtctacagggaccagctaggtgacagaaacaggagacagggccaagcataattaatcagaaggggtggagactcaggcaaagaggccactggtcctgtccaaagaggcagccagcatgagcccagccaagtgaaaccatatgggaaagccaactgcatattcccatcactcaagagagtccagaaagccagatgtttacatgaaattttctgagtctagaaatgaaatgcttatgtgggttctggtggggtggtggccaccaatctgcaacctctcaaacttcaggacagaacacaagagatgcagaattaattaaaacaccacatcagtcaaagtatctatgattcacagcagtgtaaagcccatttgtaattcatcccatcctacgagctttgaaattatgctgttcttaatgagggtgtttttaattcttagagggttccacagtttgaaattttatgcatagaatgagttcttattaatataatatgcataaggagtctatattaatattctttatatgtaattaaattgggttttcaaaaagcttgatattgcttgaaaaattaaaaaggggagtggacgctctcctctaatattttaaagttcggtcctgaaaactttttggcattttttgttagtttgtttgttgttgtttgagacagggtctggatctgtcacccaggctggagtgcagtggcatgatctcagctcactgcagcatccacctccaggctgaagccatcctgtcaccttggctcccaagtagctgggaccacaggcacatgccatcatgcccagctaatttttgtattttttgaagagatggagtcttgctaagttgcccaggctggtcttgaactcctgagctcaagcaatcctcccacctcggcctcccaaagtgttgggattacaggcatgagccaccacactcaaccctttttggcattttaaaacttgagtccgtaactggtaacgttttctcaaattcccccacaggggatgtaaatcaggaggctgtggtgagcagcaggaggggatggagatgggtctcagctttgggtgcagcaggcctgcgttgaggtccccaccctactttcctaacggtgtaactaagacaagcctctgcctcccatttccatgccccacttctgtgtctataaaatgcgccttctaggggaagcaatggggaggacactcccccagcttcacctgaggcttcccgtctctggggattctgtttcagtacatttcccccagcttcacgtaagacttcccatctctggggattctgtttcagttgatcaagtgtgaagaagatctccccaccccaaagcccaaaatcgagcttcctgagcgtttccgcatccggccggtgaccccagtggagaagtacatcaaggtttgaaacgtttttaaatactcatttttttaaaatactcattttcctaagtaagaaataagccccagtggaaactgatggctccagatgtgcaaagccagcactgaaggtaagagcacagcagtgccaggtgcagagtccaggtccacgtccttcccaaacccagccatgggaaacatgccaggctaaagtctacaagtgcaagcaccatgacctcctgctctgcagaagcagagagaaggcaggaaaatggggtcttcatgcgttctttcagcaaacatttccagggtgtgggcaggaaggcagggcagacccaggcagggactctggaatcagaccaccagatccctgtgctgataggctgctcaccttctgtgtggtcttgggcaagtggcttgacctctctgtgtctcccctgcctgtcttatacaatgggggttaatgaagcacctacttcagggagtaccctcagggttcagcaggctgcccagcatgtttagagagtgccgatgacagtcagctattactaaggtgcaacagcttggttgggaaaacagtaatgaacaagaaggcaagaccccagcccacatgtctgggtctagagaaccaacattaaccaagaaaatcaacaccatttggatacgctatgctagcaccatggaggaaacaggccggtggtgtgtcacaggataagagagggcggggtggtcagggaaggggccctttgagctgaggactgaaggatgaccaggcaccagccctaggaaaagtattctaggcgcagggaacagcatgtatgaaagccctgagatagaacacaggctgctatgtttcaggaacagcaaggcaaggcgatgcgacaggagcttgggtggagggtgggggcaggaggagaaggtgtgggtggagaagggatgtgagtggaaaagtgggcaggctagaagaaggagttgcaattggagtccaatttagagaagccgctggagggttgtaagcagggccatggaaaggcaagacctgcctattggaaagatggctctcattgctagtggagaaaagattgtggggagagggacaggagtgaccaggccaaacccagagaaaagaggccttagacgatgctctcacctgaagcctgcaccacggcggacatggctcagatccctctagaaacagttgagctccatatgtctcatgggtctgtcattttggctgggagttctgccctctgcccagctatggagaaggtggttctgcgtgctgatggggagagcagatgaaaacccaagatgaaggccgcagggcaggaggagttcagctgcagccttttgcctggcatgctcgtggtctgatggggtagctggcacatagtgagcatttggggggtatgcatctgtgagccccaatgaatgaatgaatgaatgagctccactgagttatgttgacagtttttaccccaaatataaagcaatatagagtcactgctaaaaaatatttagaaatacaccaaaatataatataattaaaacccacatataggctcttacccatgattaacattttgggggtgctccttccagaggttttcctacacatcccttgacctgtaagagtaaccaccccaccagctcaagctattattatctcttagccgctcaccgtggtgactgctttacattgggtgtctcatcttacttccactgcagccccggatattatcatcctcaaacccattttgcagatgggaaagctgaagcttaaaaaagctgaattcctttctctggccacacagcaagtgtgtctgattccagagccctgcttttaaatgttaccctcaaatattcctcaaatgtatgttcatgtatacgtatatacacacttgtgcacatacacacatactttttaggtatatgtttacaaatcaaactacacaggctgctttgtaatctcatttttccacctaacaacataccctggacatctttccatgcagtttaaaaaagcactctaaatagctattatattaatggctgtgtttttctccactgtgtggatctgtcataatttatttaaccatccccctattcctggccattgaggttgtatccggcatgagatttgggagaataatcgtgcaaggaacaccttgtagacacagaaatttgctctgagtccgtaattttcttgatattagtgcctacaaaggtgattgttcagatgaaatgcacacatttagggagctcgctctcctgtggcctagaacactgggctggccggagaatagaggaagagagactgggatgtaggtgggacatttttccagagctgggctttaattctgccaactccctgcctccacctgcctccatcccaagaatacggtggcatgggatctgcttagtgtctataatgtccctcagccacatgctgtccccacagatcccttgccggcccatgagactggactttccctctgccaccagggcccctgggcctgctctgcacaaccacagttattctctttccaaagaaagcgcccccacctagataccagagaggtgcccctcctggaggatgggaaacagggaggaaccatccaggcaccagaacataccaaaacatggttatctcctgtgagagactcctgtctaggagcaagggccagctcttaaagccacactcaccagacagagcctgtggggtggcaggggtaaggacaagaaccttgattcaggcgagaaaggtccccagcctctgcttccctccaaacttcctttcttgcccaagaaatggtaatggtggccgggccagtggctcaagcctgtgatcccagcactttgggaggccgagacaggcggatcacgaggtcaggagattgagaccatcctggctaacacggtgaaaccccatctctactaaaactacaaaaaattagccaggcatggcggtgggtgcctgtagtcccagctactcaggaggctgaggcaggagaacgacgtgaacccgggaggtgcagcttgcagtgagccgagatcgtgccactgcactccagcctgggcgacagagtaagactccgtctcaaaaaaaaaaaaatggtagctggtttccttcttccacctttcttccaccttcctatcctctcattggtgaccaaagcctttaaaaatatatttatttttaataggtaaccttgatacctaaaagggcatctgatgagatgcctccctccctctggacccctggagccactgtcacccatttgtcacgcactcttgcatagacaaggacatccatgggcctctggcctcattttcttattacacagcttgtaccatactttgaatagttttgtgcacctcttttctcttagaagtttgtctcatccttctaaaccattgcatggcacaccacacattgcatggatgggccatagtgaatgagcctccgtgggtggatatgcagcttatgtccaattgtttgctattacaaacagctccgcaaggcatcccttgcaccatcatgggtgtgtacctgtgtagctatcaggatattttagaatgaatgcctcagagtagattgttaggtcaaagagtgtttgcatctgcactttcttctttttttttttttttttttttgcatctgcactttcaaaagataattgccaggctgggcatgatggctcatgcctataatcccaacactttgggaagccaaggcaggtggatcaactgaggtcaggagttcgagaccagcctgaccaacatggtgaaaccctgtctctactaaaaatacaaaaattagctgggcatgatggcacttacctgtaatcccagccactcaggagctgaggcaagagaatcacttgaacccaggaggcagacgtttcagtgaactgagattgcgccattgcaccctagcctggatgacagagcaagactccgtctaaaaaaaggaaaaaaaaaaaaagataattgccatatcgcccttgctcctataatgcccttgttagtggtggtgttttcatctttttgcccctctgctgggtgaaacatgatgtctcacagtggatttcaactgcatttcttttacaagttagataaagacttggaagttagtctgtgtgctcccaaaggcctggctggacaaacagctttgagagctgcttcccttctgaacaattttacttgtagctggttcaaggaagctttggcccctctgtcatttgttgatgacccgccctacatgtagccttgcaggagactaattttaggagttcatcaagaacatatgctaaggggtttcgtccaccagcagcagccagcccactcgggaccatcccctcctgccaccgcctcaccggcaggttccattagtaaaagtgaactcataaccccaagcatattaaacctctttatctcagttcttctgctagaacaaatgtcccgcactgttgcctttgttcaaatccccttatgcagaacagattatttcaaaagaaggggaaaacctgcctaaacatttaccctcattttccaaaaatgtcaaatctgtccaaggagttgacaaatgaagttgtgttttttcattccagatagaagcccattttccttttggtttttaaaattaaattcagttgcttttcattcctgtgatctccacggtttggagtgtgtgtgtatatacagatgcatttcgtagaggcttctcatcgaaacagggtgacgtgcacctgccgcaatgccatctgacaacagtgccatatattttataaaaggcagtgaaaactgtagcacttgatatttctgcatctttttttctttttgctttcttaccaaataaaaattattttgctggaagtcatgaattaaatatgttaggcattacacgataaagaaacatgtttgatgttcctcacttcccggaaagatgagagcctctgagtccagctgattggaatgtgcttgttttcagtacacatcagggaggctggcttttctttctgtcttttccacccctgcctcacatgccgatgctgggtgcctcgtgtctctgtggccgaaggtcactaaatcccctgtatttccattccaggtctttccatcccccccagtcccacagaccacccagggcttcatcggctggagatctgcagtgccaggcctgaacaagtgcctagagctcgacgatgcgatcagaagctgcaaaggtgcttttgcacgagagctgtgctggcccaagcagggcgtgcactgaatccagacggagttctgcccaggggtgctgcatatcggtcaccaggcacccagggccatgccagggaaaggaagagctcccctgaatcccgaggacacagtcccctgcgtacttgctcatgggatgttgcaaagaacacaaagtgtgccttagacattctcaagtcatcagcgtcacccttccagaatgttcacgtccacacccattcttggctaatgtaatgaataaggcttctctcatttgtttttgataccttgggaatttctatgcagggctttaaaaaaaaataagtgattcaattttaaaaatatttgtctaggtccttcaatgtagcttttcattgcacctatcatcatccttatttataacgaacttgttgatcaggtgtttctctatccagatatccctgggcctgtttttcaggaagaagaatacacttagagaatcccttggctctccttgctcaagatatttgcaataagttaacagctttaaaggcagaaatgagcccaagatttgccactgggcgtagattcacaggagaaaaatgggtttcccaatccctctaagaaaaccactgctgctgacctgtcccagccacccccagtccagcacagaaagctccaggctgcccaaatgggtcattttccttccccgagtacatcaaccccacagttaccattttctttctaaacactgtctagctgtctctcttctcctactcctacaaatgggggctgggggcatggagtgtccagctggccagaaggaaaagccggcatgtcctcaggcctcatgaactggaccccaaaaagtaggagagcagagtttgcagcagcctgtgggagctggtttgtgtttcatttccaaggagtggggggttggcgcgctcttcagacccggcgtagacagggcaggaggggctgtgttcagttacccatcctccgtggaaacacaggccttcctcccctttgttggtcaggcctcactgttcctgggatggattcctccatttgtttggctgactggggcctgaggggacttccactgggtggcacccattgacaaggcccatccacccaaacatgtcctgttcaccttcctgtccagccatgggtgggtgtgctagagccaacccaggaatccctccactaaggcctctgagaacctaagtcctctaagccctgaacactggctgtcacccctctggcatgttcctaaagggactccatgatttgagggtcactaaataccaggggacagaattcctatcaaatctgggtcctcccctgcaagctctgggctcagagcccccaaatctcagaagccccagcagaagagcttctcttattcagggactctgttcttgtaaaaactaccagccttcctctttccaagggtctggctgtagacaccaactactcagtgctgagaacagagccacatagcagaaggcttctcccagccacctaaatggttctctgtctccccacaccccttgtccaaccccagagtgggaaattcctagattggcatgggctgcccagcccagaagagctgatacccaagagaacagcccttcaaggagccttgtcgttacctccgagtatggtgcccacacacatcgctgggcataggggccagggccatcaagaaacatcatggctatttaggttctgagaaaagggggagcaaggtatttggttgaattgtgtcccccagaaagatatgaagtcctagcttccagtacccatggaggcgaacttacctggaaataaggtcattgcagctgtgattagttagatgaagatgaggtcctatagaagaagggttgactctttatccagtgtgatcggtgtcctcatgagaagaggagagagtgacacgcagcggggacacggtcatgtggagacacagacatgcaggagagggcaccatgccacaccagaggcagaaatgggagggatgcatctaccagccacagaatgccaacatttgcaggcaaaccacgagaaactaggaagaggcgaggaaggattctaccccatagatttcagagggagcatggccctgccgatgccttgacttcagacttctggactctggaacggtgacagaacacatttctgttgctttatgccacctcatttggggtactgggtacagcagccccaggaaataaatatggccttgaacacatgttacctcctcctctccttcccttctcagaagacatcctcctctaaccatgtgtctttcactggtcttgacccgggctgaatctataacagacagatcacatggcccctcaaactccaaagatgtttctaatcacccagaggtttagcctgatgtagactaaacaactgaatgcttggccaagcctgtccctattaaatcctaatgttttggcatccaagtcattgctgcaggcaaagcatctgcccttggaggaacatttgtcccttcttgtgatcagacacctccaccacagtcaagcagtggccagaaagcgggattgctttgtgctgacctctgtctcagccgcatttccatcccattgctagagcagagacagcacccgccttggtgggggatgaacctcccatgtcaggttgtttttagttctaattcttgatcacaaaacaaatctaggattcatcatccatgtcatctgcgtgcccacaacaggtggcagcaaaaatctagcccaaaaggtgggttcccttgacctgtcctgacccctagcctggacaggaaatcaacatgtccatttttactcttttgaaactcaggggtaaattaactttcgccctggttttcactaacctgtgtatgttgaccaacagccctgacttttagggagactagtcagcagatctttctggtggaaatgatcagagtggagctgagaaagccatgccaccgtgtggacagctgaacctgcagaaagccagaaatcccagtgaggaaggcctctgaggctggcccgcgcctcctggccacagcgtaccagtggaggaaatgggtgtgggtgtacccgtattggatccatttaactccagttccttgtgaggacaaaaattcaagacactcagatccaaagtctgaagacacacatgttctctggacaatcagcaggtgaatacgtttcaatatctcagaaattatttgatgcttttttgctacccttcaatttaaatgacgctcatgccaagtttatgtatatgtgtttaatgccgtttaaaactattcctacttaaaacattacagtgaagttctttttagccttttgctcttgacaaaacatagatggttagatattttaaactaactgacatctaggaagtcttagttggtggggttttttttcttctgtccccggtaatgtattcaccaactaaccacatatgtgctttcatttaaagaaataaaaacaaggcaacatttctgcaggtatcaaactccagtgccatggtcctccctaccgacaccctccccctggactcacagagtgaccttttggcattaagcaatttgggctgcactcaagagtttgtaacagagcacaaatgtccagtcaacggccccagctgagaatcgaagtggacaacattcaaggattcaattaccctggatggcttcaaacttgacatttaatctatggaaatcaacctctttgtgggtgtccaaatgggcccataaatgtcaccacacactgtaaaataccgcaacatttccaaggtcgagatgaggctggtgaacctgcgtcgatgatgccgaaatacatcacagcaacgaaccaccagacgggcctcggtcaaaatgaaccatctctgaaatgatgcaaaacataattaggttggagactcggaatggattctgtcacaagcacatttcagcccaagacaaattagaaactcttaaatttgagttaggagaaaatgacatgatcaactaaaaaataaaattactggaaaacacaactattcccttacacatcgacccacacctgagtatcattgtcatgatggactctgggttttcagtacccaaagcctgggaccagattgttggggaatttataattttgtgtatttgagaaactgcatatgctatatattatatgtaacccctctggcaaggtctgaggcagccccttgaaatgaaatctattaatattttataacaaaactgaggaatattcacactcaatgaaataaagactcaaaggagccacatatgagtttggttcaggttctgccaacaaatgaatcttggtgtcaaactaaggagaatatttctaggttttagagctttttagaattcgaaactgataagagattttggacataaaatgttgccatcaacagaaaatattgtaaggttggttcttttggatctgcctttcgttatgaacttggatcaggactctcttgattgtaagaggaagaaactcaatccctagtctaagtacaaaaggaatgttttgactcatgtaactggaaaactcaaaagtaggtctggtttcaggtacagcttgatcagggattcaagcaatatcaccaagacccagggtttttctgctccaatttccttcagtttggtctatctgactgctttcagctgcaagtaacatggctcagcattgttgaaatgacaaggctatttcttagatcacagacaggaggtccccaggtaggcagagcaccagggctagtctagtaacttaaattcagcaaggatttgcatgcttttaaccacctctctcagccatgccactcccaatgccagcctcgtcaaaggctggctttcttcctggctgtaggatgggcaccgtcagcggcctaggccacatgctttcctgttcacctctggcaatagaaagagggaaaggtttcccactcatccctgcaactcctctggagggtgtcattggccagaaatgtatcgtatcctcattcctgagtaaatcatggctttatctcccttgggccaaacaagccaaccccttcccacgctgcatcgtgactctgtagtaggaggcagtgcaacatccaccggaacttcacatgcctcgtggtcacaaagatgcagcagctccccacttctcttgcttttagcgtcaagtagaacaggaagaacgcccagaggctgtttcccaggattcccaacaaaagtctcattgactctaattgggtgacatatcccttcctgaacccatcagtgtggcccaagaaatgaagtgcactgattggcttagtccttggctccacccctgagatggagtaggccacagcgcacagggcacgtaagtcgaaccagaggaagacatctcccagatggaaatctgaaggtggttcccaaaagtagggggaatggaagccgcatggtaaagacagttaacaaaacaagcccgctatagaacctgaaaatgaagttttcacgacctcatgtgtggtggtaattatcagatcgcttcaattcactttggccaatgtggcaggcagcctctgagatggccctggcatcctcacctcctgatattcacatccttgggtagtccttgccccttgagggtgggtgggatgtagtgattcctttgtatgaatagaatatgtcaaaagtgataggttgtcgcttcccagattaggttacaaaagactgactttcatcttgccagcttgctcctctctctctttctctctgtctctttctctttctctctctccttttccttctctctctctccaccactttctctctctctctcacaatctcactctctctgatgaagccacctgcaatagcatgagatgctcaatggagatgttcccaggacaagggactgagaagaccatgatccaccaatgtatgaggacccgatttttactcataggtatcagtaaaaattatttaatttcaaaaaattacagaagctggatcagccttccaggtgacatttgtcatttttagtttggggacagagccagaaaaataatccacaatccctagtcccaagttatcacctaaaaactatttgtagaggcccaccaagggctggaaatgccttctcttgaatcagcggaaaaggagaggcaggagaacaggtgagaggaggagactcaggagtggggctggtctgcgttcaaatcccgacactccccactccaggggtgtggccttgggcaggtggttggacttctcagacttctgccttccccagctgtgacatggggacccatgggggtgacagaaggatacgtggggaaagggcttggcagagagcagatgtgcagacacaatgttagtttcatctcttgcagcaaagcaagagattcttcagaaacagggtgaagatcaaatgagacgctggtgataaagtacctgctgaaacatctggcgtggccaagaggttcaacaaagactggctggtgctacttttactgctgctgctcttgttgttgttgttaatgaacatgattctaccgcccatagaattaggccgtcagcaggcttttcaattaagtgaactacatttatttcagcacctatccatgtttaaatctggccgttgccagggctcaagagaaagctgggtgctccttcaaaataacacaaaataaattaaacttctctcatgcccactgaaaaaaataatatttaatacctttctggggccattcacttaaactttaaaaatgggtcccaaaacaattctggattttatgcttgctgagcctaattgcatgactatgaggtgacctgacagggccttagttttaggagatgatcgtgtggttaataagctgtgttcttcatgggtgggtaatgattctgattagatgaaattcaaacgagggctcttgggtaagccacagacctggaatccccggcacccagagagagctgcttgctccccctgagaaattaaacacaagtgtaagcaactgttgtctgagtgtttgtgcatggctatgattgattgatttactgttcagaaagctcccttttaattaggaagtaaatcttgcttctcgatgtgtgacgataactgtcctttgagaatacacaggcagtgttgacccaggagtgaaggaggagccactcgtgccgtgggaagcatggtgctatggggaagggccggccccaccagaggcctggacgtagggtgcccagcaggaggggtgcatggccagggctgaacctgggctggtgctggacggccactgaggaggagggtacaaaaacaatggctcacatttattgggtcctaccaaatgtcagtgtattaaagagtctgaccctactttttgatgtctgcctgctgactctttaaatctgtccgtctgccccccatttggggaagctggtaagaaagcccaggtgctcttccctttggcatgagggggccgttccagccatcctccaggcccaccccaggccccataaaaatcccaaccggcctcctttccttgcactctccagccgttttcaaacctgctgggaaatctgctctgctctcccctggaagcctcatgatgcaagtaatcaacttttcctacctctcggtgtgtgtcccgtccctgtctgcattggacaaggttttgtggggagggtggtccatcctgtatctgcagaccagcaggctgctcctggcagccagatactgtgctaaactcattccaccttcacagcaaccctgcatcctccatcctgtataagcccccatgtgagggggagaaacagaagctatatgaggtgaagtgacttgcccagtgtcacacagcagtggaaccagacctcaaatcctaccctgcatgactccagagccaccagaggaccatgtggcatcgcacaagttcacagggaaccacccacagacgtggcataggctgctccctctgcccagagctcacctttgtcctccagggatctctcacacacctacacctcttgccaggcgtgggaggtagagttctaaaagtgtccccactgcacacccaggattccacatcattgtccccagaaactgtgactatggggagatgtcattgccatggttatgttagggtctatggcatctttgaccttaagacagggtgatgagcctggattatccaagtgcaatcatccggtgtcatcctatgagctcttaagagtggagcgttttctccggctggtggcagaaagggaagtcagagacattgaagcatgagaggggcgtgacctgtcattgatactctgaggctggagcagagctcatgaggaggcagcacagcctcaggaagctgaaaacacccctggccaagaaccagcaaggaaacagggcctcaatcctgcagtcaccagagctgtgttctgccaaacacctgaatgggagagaagtgggctctcccctagagactccagctaagaagtcaagccagctcacaccttgattgtggcctagtaagaccctaagcagagaacagcaaggtccatctggatttctgacccacagagctgtgagatgatcaatgggtgctgtcttaagcccctgaatttgcagtaatttattacagcagcaataaaaaactaaaagcaaatccaccacaggtgccaaggatgcgagtccctgactgctcttcacctggggccctttttcagagctgtgtttgcagccagcatcctttagggacaaggcaatgtctccctccagacaaagagcaggccttcttcctgcttgctatgaaatggttggttcccaagctccgcattcctcagctgtaacacaaacccaccatgtccatgggacttgagggcaagggaacacacatgctgaagcgcaggctacttattgtgctgtgagtcatgaagtccttcgtctttgatccaggagtcttgtgtcttctgccagcatccatgaatcagtagcactctaacttacgagcttatatgtaaagtaaaatgaaatcccagaccccacaacagttccttctccttttcaccatcaccctcccactcatctccagctagcagctggtagcccttcctgagagtggctttttcagccctgtgacaccttccacgccattggagcaacaaatactactccttcgtaacagtttgtcacctaaaacttttgcatttttgtgtgatatttttacaaatatctgagtcccctagtaacttggtattccaggtatcatgcctgacttttctcaccattacatacacagtgtctaagaaaatgcccagcccataatagctgctcaacatttattaaaagaaggaagaaactgctggtgatggagtcaggtcattgagcccttgagacagtcacagtcccacagaatatccacaatatcacattccaataaaattacaggccaggcgcaatggctcatgcctgtaaccccaacactttgagaggctgaggcaggaggatggtttgagctcaggaatttgagaccagcttaggaaacagggcaagaccctgtctagagaataaataaatagattagataagtaggtaggtaggtaagtagaaagatggatagataggtaggtagatagatagatagatagatagatagatagatagatagatagatatagatagataaaattacaatcacctccaatgttcaaatataatgctgtcctaaaaacatgtacaaaggttaagtgtttaaaatcttagcaatccccatatatatcactagggagcttctcttctcataaagagaaaacatttttacgaagttcctcattccccttgccttagatgtaatagtgagtgccatgtttcagctcaacacctgttctttagaggtgctgaatctgaagactaaacaggaagccattggatttgcctcccttgagcatccacatgggccacggatgcgccttgttgtacaatgacattcatcgtggttacgacaacagtggtgtgagacacctttacttatcatctctggttttagcaatttcctgttttccctactcatttttataaataattattcaaaaatacaaagcacattccaatacttgcaccaacgaaagccagagaactactaagatggtgccgggcccatcccgatctcgggggtgcagagaccaggtggcagctgcactcccaggcagcagttcaaattcatctgctggctgctacggcaggggttatcctctaacacacagcaagtgcaagaaaaagtatatgccgttctcctttctttaaaatatgcctctcttgcactgttttattccagcattcagtggagacatgggtgtggagaaggagtcaagatttctctctactacaaggaaagctgaatcctgaacaaaacaataaatggtaacagacacgtaaattcacgatcaaggatcctgaagggcatggcagagacaatggcgtctgtagaacccatgtcctgttgagagggcagctgcccctcagcgccacgggtcactgcctggggaagcaggggacagcacagccagatctttccagcttccaaaggaagccgaacaatttggactttataaatgtaaaatctcccgattttaaaatgtcttttaaatgtttaatgtttttaattattagtaagccgggcgccgtggctcatgccggtaatcctaacattttgggaggctgaggcgggaggatcagttgaacccaggagtttgagaccagcctgggcaacacagtgaaaccccatctccacaaaaaataccaaaaaaatagcagggtgtggtggtgcatacctgtaatcccagctgcttgggaggctgaagtgggaggatcgcctgagcccagggaggtcgaggctacagtgaactatgatcgtgcgactgcacgtgcctgggcaacagagcaaggccttgtctcaataaataaatagtatttaataaataaacaaatactatgcaagttaaacccaataagccagcagcctccaattgataatttctgaaataaactcatattttcaactgcttttgtgacttctccacttggatctctaaaaggcatctcagacctgacatgtcaaaaatgaaactctcgattccagcaggcatctccccgccccatccacccccacaccgactccaacacacctctgctcctcatcacattcacaggcaagtcagtgaccagagcattcattcaccacccagcccatgcacaagtctcggctccctctgccccacccacctccccaaccatccttcagcataactctctgcttcacccacctccagcaccatcatctctgtgaaagaacaggcattgtgacactgtgatgcacacctctggtagagacagccgtgatggcagactgtgtgggccatggtggatgttgttgttgtttgcagtgcacaccagcctggaaatgcttcagcctggaggtgacgtgttgtttctactcatatctcatagcccagagcaagtcacctgaccttgcctaacttcaaggggacaggaaatcttcatcagcactcgtaatatctaccacagggacaagtaacttctaccattgctaaattttgggttttgccagtaaagaacacttaaaagtatatatccaccactaccatctattagatcaacagcggacaaacgatggcccaacggccacagtcggcccaaaacctctttgtaaattagggtttaccagcacacagcctgttgcttgttgtatatattgtctgtggctaccattggcgctacaacagtgctgagtagttgcaacagatacttcgggtcctgtaaaactgaaaatatttactttgggcctttacagaaaaagcttgagcacccctaggctcattcattcactgtcacaattatctcataaaagaacatttgggccgcgcaaggtgggctcacgcctgtaatcccaacactttggggggccaaggggggtggatcgtttgagctctcctgaacaacatgacgaaatcctgtctctactaaaaatacaaaaattagctgggcgtggtggtgtgcacctgtaatttcagctactcgggaagctgaggctggagaattgcttcaacccagggggcagaagcttcagtgtgcctggatcacgccactgcactccagcctgggcaacagagcaagactctgtctcaaaaaaaaaaaaaaaatggaaaagaaaaaaaaaaagaacatttttaactgagaaggtagggaaatggtatctcagaatagaggctcacccttaaatcagatcttgatggaaaagacgtgatgactttattttcttcatatatctgcaaaaagaggaaacttcagcagaggctgctgtggggcacagacaagtgtttggggagccctggactgtgaaatcctttagggattaaaactcagaggctgggaaggaagcggcagacaagtgaattgggccgcgtggggccgtggggccgtggggccaggaccgtgggcagaactcaagcccacctgagaggcggggccaggaagctgcagccaatggctgccgtggggcggggctccagtacagtctgaccttctgatttgcccaaagaagatggaaacacattctcatcttgtcatataattcccaatttaagaaacaaaaaaaacactctgaaggacaaatttcatgactgttgtttcccccagagatgaagctggggaacagaagtgaccctatagaacagcagactcatcgagtttaccagtaatgtttcatttctttatttttctaaaaaaaatgacacgaagcaaaaatgactggaagccactaaaaggaatgaagtcgtgatacacgctacaacgtggataagctcggaaaagaggccagaaaacacaaaaggtcacctattgcatggtccagttgatacaaatccagaaggaatcaacccttaggaacagaaagcagattcaccgttgtcaggggctgggcagcgaacaggagctagacgcagagatagaggcgatggctgtataacatggtgaaagtgctaaaggaccctgaatcgtgcactttaaaacggttcattttatgtcatgttaatttcacctcaaaaaacatgactgttgtcaactctgggtgatgtgcgtgaaattattcttttacatatttttcccaatttctgatacacatattggaatatattttacccactgcacgggtgaaattcaacacagtgcagggccaggacaggcccttgaggcaccggtttgccgcggtagatctccatcatccacggtgcccatcgggtcacctggtcgtcactccaccggcggtccccacccgggagacctgcttatctctcccagcctcgggaaaactgctctggtgggatcagagataaaaataaatctgcagaatgttgggccagacacgaaagagaacaggctgtatgattccatttatataaagtgcagaaacagacaaatctgatcaatgctacagaagccaggatggtggggtcgttgtgcggtggtggttgggaggggcatgaagggggttgtgctggtcacttcctgtttctgaatctggatgccggcggcacagatgtgttcagtttgtgaacgctcctggggctgcacaatcgcgcatgcactgtcctgtattacttcggctttagagaagtttttaaagaaataataaatgcataaatccatcagatacattgaatttcctgccaagcctttgaaatagaggcccaggccttggcttcaggttgcaagacacccgagagttgagtttgtgggatgttgtacagacgtgggtctcaaaggcttattataactttttttatgcaaacagaaattaccccagcacatctggagaccaagctcctaaagcgggtgtgagtgcagcttgtcactgtaccttcgcagcacgaggagaggagagttcgaaaccacaaagctccttcctttctttcaggagaaagaaaatggaggatgggaacgtcatcagcccagaccaaagctgttctcaggcttagaatcagggaaggaacgtaattgcagagggcacacgctcctctaattttttggaaagaatctgaacgcactggtgtgttattgagtccctggggaagctgctgcccctccccataccctcactccctccacaagttcacagacacctcggagggagcccaggaaaggctgtgaaaggaccgcacccagagttgccttccagagcccctgctcccctcccaggccagcataccgagccctctgaagggatcccacagcagcagcccagaagtccacattttcatggagtttgtccacatccacagcaaacagcaggcaggccggggattatataagctaattaccccattccttcccctcagtgcagaaaaggtcaggtccccacagccagcgggcaggctcagagcacaagtacagcccccacctccatcccccgccccagggtgtgggaggagaaaggagagaaggaaaagagggagggagggagggacagagacagaaagagaggagaagggaaagaaaaacagacaagtagaggcaaaaacaagggagagagagagacagaaaggcaggcaggcagaaaaagaaaagaaagggaggaagacattgaaaggacaggaagacagagtgagcgagaaacggggaacaggaggggatgggagggaagaagattttcctttttccttccttttctttctctgaacttcagcacagggagaatctgcattcccaggacaggagcacctcccccagcagccctagtgtgcgctgagcaactgggcagaaccagactgcatgggttcaagtccccactggccacccgcagccactgcatcccattatcccaggtgaacggtttcctcttgagtgatcagggcctcgtctgtgtcctccctgtagtgtggagaggacatggatggactctgcgtttatgccccggcaggcacgcaccataggggctgtgccttggagcttggaatagggattcctccaacagcagccatcacttgagaaggggccacagctccatctacccaggagagggccagattatgcccatactgcaggttagcatctgtcccatagagaagggtcctggtgtggtcacttgttctgtccctgggtgacgggatggacaagggggatggtggtgatagtccccatgttagtcaccagctgggagctggcttgggttcaggtctcacttccatcactaacttaggccgggctggggcaccaggtcctggcttggcttgcgccctgagtagagctggtcctgacagcggagaccctgtgcccaagtcccccctgggaagtcagtgtccccataagggcagttgagtccaatgtgcagaggccctgaaggaggtgatcgtacttctatccctggtcccccactctccagccatgagtgttgggcagcccctgatggggccctgacctataaaatgggggtctcatagctgacttcaaaagaccctggggggacccactcagatgactcacagggtgggttctcgcagtggctgccagctgtccccaccattacccttggagaccacaggcccaatctgaggagcctcttacgagagggggtcatgagtctggggcttactggggctctcgagatactcattccccactttcttccaaccccctagaagcgcctccagcccccatgcccctgggctgatgagaaattcagttccagccaaatggaggctgctgttacgcccgcaccttctcaaagccccagaggcctagcatggagccaaactcttggggaagccccgaactctcagttcacaatggtcagtcatcacttacaagaacagcaagggcaactatttattgagcacttcttttatgccaggcattgctctaagtgctttatgtgtttaaataatcctgactgcagattacagaggggcaccattcctatcgcagatgaggctcgcctaaggccaccagcaaagtgattcagcctacttcaaaccctgaggtgtggctctggtccctaggctcttgatatacatagaccctaagggtctcttgagggcagaggccaagaggtggaggcagaggggctttggagaagcaggggcctgggcatccagggtctagcctggcaggaattcctggcagccctaccaatgcagactctgccatctgcccaggaagctgtgagactgggctgtggcccccccagccctaggaccccctcccagcttggtggctgtttttctcactatctcagccatgccccccacaaggcatcttccttttgaaaataaaaaccaggagtgggcaatttcagtcccccactccataccacaaaaccctgatgaaggagttccactgccttctgggaagaggagaaaggaaacacacacacacacacacaagagcaagtcacaaattaacatcacagcacatgaggtaggcacacctgcatttctgcagacacgcctgggctcaggagactgccaagccccaaccagcctgtgtcctgcagggatgtatatcccacttccagcaacagtagggccctgacatttaatcctgaggaggtgacccccactggcatctctgaactgggccttgacaaatagcagtcacttctgaatccattcccccaaaaggtcaccagccagacgccaacaaaaaacccagccatcgctgtcacatgccgtcagtcttcccccacccccaccttctcccccatctgtctggcttgtggaatcctgttctggcaggaaggtactagccaagacccccacctgccagggcctgtcaccctcctgactcccagaattccctccttccccctcaccaagtgggggattctcaagcctctgtcctcaccccggggaggaccaccagggtagtgggcccaaaccctcccctgctgcctggggtcagacacaacgggcttgccttgaagcagaggggccaagggtccttccctacacctggagaaaccaaagccccatgaccaagtgttggccccataccctgggaaagaaaaccctctgtgaaagtacagcaatcccagctccctccctagtctgggccctaatccaccccagatacttcctcagtttgcaacaaaaatcgctaagcagctctcacaggtctcatctccttcaccaaagcagtccgccgagcctcagccaccactaccatgtggcgccacgcacagggtgcaggctgagaggtgtggcttctccacggatcaactcgaatcagcctctcagtcatcggctgcatcttcatcccagaaaccgcccttgaccaagcatcctgccaggagctccctttagctacattttcccaactaacgtgtccaagtgtgcttttatctgaaagccttacttttttatggttttcttttcaaattatgaaaattaatgcatatttacctactgtagaaaatgagtgagacataaaacacacaaagaggaaagtagggttcccctgccagacttggccgggactgagaaagtgaactgccctctgtgggagtgactcttgaaagccttgggatgtgctcctggcttccccaaacatgcccacattccataatatctagtttccatcttaagccactgtcctgggaggaatccaggcccccatcacttattcactccctcattccagacctgggttcgaatcctagcagccccgtgaccacctccccggcttcctcatcacaatatggggctgttgcaaggatttgatgaagttcaccccacaaagccctttccacaacgtctgcctacagtaagtgctcaagaaacagcaccaatgaatgttaacatcaccaccatcacagtggtatcaagggtctctgcttaacagaggcatggtctgaagtgaggatttgagggcaggtagtttataggggaggtggtcccaggaagtccaaggagtaggcaggtgagactgaggaggctaatcaaggtgtcatcaaggccagctgccacatgggccccagaggagaggtgctggacaccctcagggttatctcacctgtggggcaagggagctggggtatttatcctccgttcccaccatcactggctgggggctgctcttgggggaacttagcttcctgggatgtgggtccagactggaatggtgagtacagggaactgggcagaaccagtgcaggtgctgttcagtgctggatctgtgcttggaggtggggacacagacaattcaggttctaggctctccagggactccccctggagactggaaggtggacctaggagtggagactcatattgctgcagccattcacaaaatgcttcctcttctctccgtatttctccctcactcttcattgccacaaacaggacaggggccccaggggcagggtcatgcactccgccctggctcctggtcacgctcccacctcggcaaccccccggagttcagtggagaccctgcatcctgggtccacaccagccttgttcacaagacaaggtgacagaggccatgcgttcagatgtggagcagggagacttgagtatgactcgaccttttacctgatggtcccgggacttcgggaggagatctgccctgctgagcctctgcttctacatctgcaaagtgagacttacaggcttggccgcctctttaggctgcgtgaagaatctggagatacagggaacattcaacacacactgagtgcctgggtctgctcatggtttcccaattcagatccaagaaaagcacgctgctgccccgcaagaccagaacacagagcccctccctccccaggagccggacctgagcagcagggggttaaagagcagtacccgggctgtccccgggtcagggtcgtttgcacgaaggcagagccgcggaagagggaaggaaatgccccgggtcccaggcggggcctcgagcgtgcccacgccgccccctgctggccacgcctggagttgcaggaaccgggcgccgggcgggacctcagctgcgggctccgcgctgctcccgcgccgcgtgggtgaagcgccctccccggccacgcactggggtctcacaggggccaggctgaaaaacaatgcacgccttaaaggcgggaggctggcctggcgcaggctgaggaacactgatgaacgacctcctgcaaaggattgtccccagaggacagggctagggggaagcaggacggcgcagcgtctacacccccgcgcgtgggtggcccccggaactgcccacacccctggctcccgggtcagccggtcactgccagatgcaccacccccaccgccacagccaggagaggggatgacatggggtgggaaattcaagggagagcccaaaaaatcgttcttcaaaataaatcgtattttgaaaattcaaaatcaatgcaagcatatccaagaacaaaatatcaaaactgtaaatgaagtcaggatcagtagtactgatttgtccttttgcctagggctgcaatacggctaggcccagcgctgttatttatctgtcattatttaaagctttgatattaagccagtcgaggtggcccacacttgtagtcccagcactttgggaggctgagcggggaggatcacttgaggccaggagtgggagaccagcctgggcaacatggtgagaccccatctctacaaaaaatacaaaaattagccaggtgtggtggcccacggttgtggtcccagctactcagaaggctaagcaggaggatcacctgagtccagagaggtaaggctgcagtgagctgtgatcacaccgccactgccctccagtctgagtaacacagtgtctcaaaaaaaaaaaaaaaaaagaaaaaagaaaaaaaaagctttaatattttgtatatcatgaatttttttgcattgattttgattttttcaaagtcacactaaaatatcctctatcttgattacagggttttgggagttgtgcttttttagcatttccttaaattttgcacccaaggcgatggcatcacctgcctcaccctagccgtggtccctccctcctgcttctttctgtggtctctccccaggggctctggatctcttaactcctcaggcctccccaccaggcaaggttcaccacccctccttccagcagcctctagaaggtggaacgggcaaggaaacggattctacgctagagcctcccgaggagaacacagctggccggcacctggattttagcccaggagactgtgacggatgctgacctccagagctgtggggtagcacaattgtgttgccttacactctgaaatttgtgacagcagccacagtgccctccaggatgcttttttttttttttttttttttttttttttttttttttctgaaatggagtctcgctctgttgcctaggctggagtgcagtggcgtgatctcagctcactacaacctccgcctacagggttcaagtgattctccggcctcagcctcccaagtagctgggattacgggcacccactaccacgcccggctaatttttgtatttttagtagagacgggtttcaccatgttggccaggctggtctcgaactcctgagctcaggtgatccaccagcctcagcctcccaacgtgctgggattataggcatgagccactgtgtccggcaccagcatgctttaaggagtcgtgggacccctggagatgacacaggagagagagagcgggtcaggggagaaggttggcctcactcacacaccactgaccctggatcagtctccttgggctgccataacaaacgatcagagactagggggcttaaaacagcacagattgactctcatagtctggaggcagaagtcaaaagtcaaggtgtcagccgggccacgctccttccaaagcctccaaggtaggatcctttctgcctcttccagtttctggtggctccaggctttcctgcagtggcttgtggctacatcactcccaaacctgcctctgtagtcacatcaaactctcctcctctgactccaatctccctctgcctccctgttctgacacttgagatggcatgactgcttactctaccttagctggacctcatcttcaagggactacagaaaagaacaggacccctgggtcttaccagctgagactgctggagctcagaggcagtgctctctcaaataggctggggagcttcatgactacccccagctcctctcacctgtccttcctctgccaatggaaaacaaaaagaactgaccgagctggccaaaggagtttggaccataggggatctttggaagggtgtagggtcttgctctctcttggcactcccttctccttgtgagatcttttcctctttagctggaatgaggaatgcagcgttccactgcccatctagacggcttgctagggtcaaaatatagaaaataaaaaggggagattatctgccctcacccagatgatgctggataaattccccatcccaagagccttgttttaatcattcatgaaaatacctttttttcccaaataaggtcacatttacaggttccagggattgggacctgatatctttggggcccatttctcagcttcccaggggccctgtgacatgccagctgctctctgggacaggcgagggacagccgtttaagagctcagctgccagacagacctgagtgcccccgccagctctaccctcacttactgggacccttgagacaagtgacatcgactctttgagcctcaatttcctcccttctacagtggggagctggtcatgtcttatgaacagtctttggcaccagagagacactgtgtcaatgctagtgctgatgacatgatctctagctggggaatcctgactggtgttggtcagactgccctgaccactctttgtgctgcccatagtgagctctgtggccttgaacaaatggccttacatctctgagcctcagttgcctggtctgtgaaatgggggaatggccgtgcccatctgacatgttcattggaaggattagatgagatggtgcatgtagaaagcttggctccttgcagtggctgcctccacctgcctgtgcccactgcctgcaggaggaagccaggggacgtggcgggagtgctggtacccgggcctcctgtccttctcggagggcttggctgccccagctccctgcaacctcaggtgccgctgcatcgttcaaacacgaggtgtgtcacatttttacatggtcagctgtcatttcatgtcatttctggtgacaggagctaacctcccaggacacctcactcatgctcagtggtttatgatccccacagatggaattacagctttattatggataaatggccacatataatcccatattttatttttatttattattgctaattatatgggcaaacccttgtgacttaggggaacacataaattatctctaaatcattcctgcagagttgatttccaaagaaaggagagttaacaggcctatctgggctggagggcgatgttatatatatatatatatatatatgttttacatataaatgtatatttacatagacgtacctcatacatatccatacatgtcagatatgtatcatatttatttttttcccaccaccttcagtctcccaggatttgggggtcatattttcaaaggaagactgtgaaggacaatttgaaggcaatctgaattgttaacctggtgaagccacagtcctcttattcacctgaacactcatctaggtattgctgtgatggtgtttggtagatgtgattaaagcccatgatgtcaagtaaaggagactatccgggatgtcccaggtggacctgatccaatccatcagtggaaaggatttagaactgggctgaggctccctgcagaagaagaaattcctcctgtgacagtggcctgagaggtgcttgagagacccaacctgtcctcaccgtctctccatggattccgaacttgcctggccaggccccacagtcacctaaaccaactcctcccaataaatccctcaatatcttcctcctgcttgtttattctctggttgaatcctgactgatacaaggaccacagagaattactcctcatgaaacatggccaagatgctaatgctctaagagctggcacaaaacaccttaaacggaattgttggagtcctcgggacccatacaccctgggagtccagggcagccacagagagactccagaggccggcaacatactgaaatgccctcaggagcctttagtccaccctctccggggaaaacaaggctcagaaagggtgcattaccaccttgagaccacccagggacacccaggctgcctgtagcagctcccattccccagtgactgctccaaagcaccctccctaagctggtgattatactgttagtggcttgaaacaatagcctcatgctttgtgtgtcagaaacctgggcagggctcagctgggatggttcatctctgctccacacggtgtcagctggggtgactcagttagggctaaaggatccgagatggcttcactctcatgcctggtgtcatggctggcggggctggaaaactgggagctggctgggcacccctctctctctccctgccccacaatgacctcccaactattcctctttccatcagagttgtcagatctctttacatgccacctctaagaacccaaaagagtaaaggcagaagctaccaggcctctcactgcctagcccaagactggagtagtatcagacaaatcccaggccagcccagaattaaggggagaggaaatagactcctcttccaatgggaagagtggcatgtacacacagggacaggaggaattgttggtagctgtgggaggctacataatgccccccaaaatgtctaggtccaaatccctgttccctgtgaatatgtcaccttatgtagcaaaacggacttcacagatgtgcttaagaaccctgagatggagagatgatctgggttatccagctgggtcctgaatgttcaagggtcttaacaagaaggaggcagagagagatctcactacagaaggaagaaggcaatgtgacaatggaagcagagagaggctggaggatgctgctctgctggcctggaagatggaagaaggggccacgagccaaggagtacaggtggcctttggaagctagaaaagacaaagaatcgattctcccccagagcctccagaagggatgcagccctgcagccaccttcatttcattcatgaaaccatttaggccttctggcctctagaacgggaagaaaataaaatatgtgtgctttaagagactgaactgtggccatgtgttacagcagctgcaggaggtgaatgcagctgccgtctctgcagacaatcaccatggggactttcgacctccttgaccacaatgccctcaatgcctggcacagggtgctcaatacttatgtgggttggggagagccagcttcacaccccccagggctctctctcctccccatcaggctcagacacagaaggccagctgcctggagctctctgccacacaaaccctcccctcagaagggacacacccacctatccgtctcttgggccaggcctccttcacttcttcctccccacctcctcctccctaccttcctggacccaggcctctccattcacccctggggcaagcaaagccccaggcctcctcacctccaagtcttgcctctccctggagagggacaagacctctcacttcccatctgattccgcctcattctaaggaacccatgtttctccagccaacaaaaagcagaagctttggagtagcacaggcctcggatggaatcctgcctctgagatgggcttgttgtgtgagtatgagtgagaggctggatttctcaagcctcagtttgccatcccaaaggtgaccacctcccttgtacttcccatgtgtctgcatgtgcatccacgtatgtgtgcacacctatgtgtgcgtgtgtgcatgtatgcctgtgtgtgtgtttgcacctgtgtgtatatgtgtgtgtgtatttgggctggggagtattaaactagatgaggtgtggtgagcagctggtgcacggctgtgcagtgggcatctcaggtgtggtacatcaacagcagctcctctgacctctgtctctaaagccagctcttcccacactcttcccaagctcagcacatagaagtttgctaaggctgggaaactagaagttatctcacaccccacacccttctggcaagcaaatcctcatcagttctgtctcaaatctctccagaatccacaagcttctcacctgctcagagccccaagaggagggtccgggccaccccaccaggcaagctgcccagaccagcagaagtacgggccagagacagggtgtctagaggggccgtggaggagggagaaggtcagtgtcaaggggcagcctcagggacaacagctcccctcaccacccatctcccaagaaagccctaaaaacgagggctctgcatccaggcagggtgggatccaagaggtggtgaagggagaactaagaggatgtctgagggccagacatggtggctcatgcctgtaatcccagcactttgggaggccaagatgaaaggatcatttgaggccaggagttcaagaccagcctgggctacaaagcaagactccatctctacaaaaataaaaataaaagagggtggctggacagcagatggcaaccagttcagaaagttatggaactttttcatgaagccaaagatctattgagtcactgatgtgttggatagcgtggaggtctctgggtaaccggtgaaaagttgaagttgaatgaatcagaaggacacttaaaaaaaaaataaaaaaactaagcaagcaagtaatgttgcagttattaaccccagggaaaacaaagctgggtagaaaagcaagaatttcatagtttatgacatggtccaggacatttacaaagtaataatattggaaacatggaatattgatctaggcaactttatcttatgtcatatggctcagaaaggagggtggacttgtgtggcgagcacgtgtgtaaggaaagagagggaagcccttgtttctgaggaaggaagtccacgggcaatgcctgcagctgctccatccagacggagcaggccaagcatgtggtttaggtgcaaagaaaaaaatggctgagataatcaagtcaaagtgtgggatctccctggtcaggcaggtgcaatggataccaccttttttttccctaacaacctttatggaaatatttggctctaagcatagtaatgactttgattaaaacataaatttgaaaataagagtcccatttggttctaaatggtatttcatttaaactgtgccagcacatggtaagcacagaataaattaatgaatattccatccaaatccctcctcccacgcaaaggccaacctgggctctgggagagtggaagggggcacggccacgcttgggccagcccctctagtccacgctttctcatccttcccacgctggagccaggtgacattggtgaggggaaggccggagcagcccaccctcatgttggtggtggtggtcagccccacagtttttcagtcattccagctagtggcatcttgccacacccctgacacacatgcttctgtgccgcactgcaaggattcctggtagggtgaaatccccgatcccattgacctttcatgacccaactctgggggcatgcaagatgagtgagctccattcccctttctcaggaccatgagcatcgaggggtggtgatattggtcataccaggacatttctccccagcactctcacctccacaagggaagagagccaaataaacgtccaactagggaaagagaagtcagcctcccatttttttcagacgtccccaaccttcctgggcttctcctgagttggtcttttttctgtaggaggaggagaacctattgaaattgaatcccccaggggaaaaaaatggtattgaagccctttacattacaaagtttgtcataaaatcagatgtcctcaaaaatattttaacaacatggctgggcgcagtggttcatgcctgtaatcccaaccctttgggagaccgaggcgggcagatcacccgaggtcaggagctcgagaccagcctggccaacatggtgaaaccccatctctactgaaaacacaataattagccaggcgtggtggctcacacctgtagtcccagctactcaggaggctgaggcaggagaattgcttgaacccaggaggcagaagttgtagtgagctgagattgcaccactgcactccagcctgagtgataaagcgagattctgtcccaaaaaataaaataaaatatgttaacaacaaagttgtgcttgaggaaggcatattatcttaaaaaggagaagggtgtttcaataaatgctactttgggaggcttgccttgatgtcatcaacaagaaaggagaaagcagcccattgattttgttattatctggaggtatcttcgcatagcaattattgcttctcattgtaaacaggtgtgttaggcagaaggctaaggtgagcccatgattcctgcctctgatgtcagtacctttgtatggccctttccctggaatgtgaatggaatctgtgacttgcttctaactgatggaccgaggccaaggtgagggctatcgtgcccgtgattatgttaaattatatggcaaaggtgaaggaattttgcagatatcattaaggtccctaatcggttgacttaaagttacttgaaagggagattatcccttgtgggcctgacccactctggtgagttctctaaaagaaggtgagaagtgagagcctctctcttgtccctctctctgtctctttcctgctggcctcgtagaagcagcaagctgccctggagtggattctacagccacagggaaatggattctgtcaacagcttgagggcgcttgggagcaaagtcttccctccagatgagaaggcagctctactgacactttgtgagaccctagaggaaaacccagataagctgtgcccagacttcttacctaagaactgggaaagaataaacaactattgtgttaagccactaattttgtgctaatttgttacactgcaatagaaaactaatgtaatgagtctattaaaatctctttaaaatgcaataaagcaagtgactacacttcgagatcactggcttacacctacaggacaaatggggagagccatcctaatatgctgcaaacgtgccttacgatgaaatggggattgacagccctatggggggaatttggaaagtgctgtgtgtcccacaacttgggtgggagtgaagacactgagctgtggaaagcatcactcagacatcgaggggctggtgatgaccaagaggctggaggaggcccagcggaagagttgacatgaaacttactcatgagatgcgccagagggaactggccatgtttttgattcacacctcgtgttgtatagtatgtgatttttttttttttttgagatggaatctctgtctattgccaggctggagtgcagtggcacaatctcggctcactgcaacctacttcttccaggttcaagccattctcctgcctcagcctcctgagtagctgggactacaggcctgcgccaccacacccagctaatttttgtatatttagtacagatggggtttcaccatgttggccaaggtggtctcgatctcttgacctcataatctgcccacctaggcctcccaaagtgctggattacaggcgtaagccaccgtgcccagcctagcatgtgatttttaaattgtcaaccccgaaaatctgagacaggtctcagttaatttagaagtttattttgccaaggttgaggatgcgtacccgtgacacagcctcaggaggtcctgacgacatgttcccaaggtggttggggcacagcttggttctatacattttagggagacaagagacttcaataaatatgtgtgagatgtacattggttcagtctgggaaagtgggacaccaccagacgaaggcgggacaactggaatcggggaggaagcttccaggtcataggtagataagagacacacagctgcgttgttttgagtttctgatgagccctccaaaggaggcgatgagatatgcgtttatctcagtgagcagaggtgactttggatagaatgggagacaagtttgccctaagcagctcccagcttgactttcccctttagcttagtgatttggcagccccaagatttattttcctttcacaaaacgtatgtatataactagttaaataaacattgtaaaggcatttggcctctacatctctctttgtttttagatctttttagaaaatcagggagaggctgtttcagttccccccatacattcaaatgctatttgctgtaaatggattcaggggcatctgtttcccagatagggggtagatcactgagcttgcaagtaggggagccaggacacagagcaatcgcctccaactcagagacatcctttcaagactacattaggtgaacatggagagaagaaagtttccaggcccagagaaccagcagatgacagggaagtcgaggtagccctggggcgttgtggagccctgggagttagccaagacccctccactggaaccacaggtgtccacgggcagcaagtccccgtccccctagactcctagcaaagttcccaccttaggtgctaaaactcacacctcttcaccaacacctacttgaaactcctcaccttccagagataataacttggctttcaggacaatttcatttgtgttaatggaaaaaaaaaatccttggactaaggcttttaatgaccagtcatacctttctcattccccagcccactgagaaaaggatcttgtccatttactctcccgaaaacgatatgtggggtaatgtgttccaggaacctctcaggtcttaatggcagagaaagcccatgtgggggccacactttgatttaatgacatatactcatttagtgcatggacagctaaaagctaaaatgcagtgactacaaaattactgtcaaattctacctttttgtttattttgctttgtttcaagttccatatactaccaaatgttctcaaagttagataaaagctacacattaaatttggtttccaaactaggtcaatctaggaaaagaaaaagatgttgttgcctttttaattctaaaataatgtaatgagaagaaatacacatgctttctgctcaatactttccttcagaaaaccacctttccaactccagtcagccccactcctgcaatcatgtgtcagtcataggactccacccccaacacatgcacgtgccaagaaccagtctggtcagttagaatcctccatcctggccgggcgcggtggctcacgcctgtaatcccagcactttgggaggccgaggcgggcggatcgcgaggtcaggagatcgagaccatcctggctaacacggtgaaaccccgtctgtactaaaaatataaaaaattcgccgggcgaggtggcgggcgactgtagtcccagctacacgggaggctgaggcaggagaatggcgtgaacccgggaggcggagcttgcagtgagccgagatcgcaccactgcactccagcctgggagacagagcgagactccgtctcaaaaaaaaaaaaaaaaaaaaaaaaaaccctccatcctacagagccacagggattggttctaagatgtgcatgtgacccaaactggctaatcagggacttcgctgagatttgatgccaggagagactttctccttctctctggggtcttaagctatgaagaccacataagctagagctcctgcctccattgttccctgacacatggaaggacctgtctgcaggaaaagaggaagacacagataaatgcagagacagtggagataagagagaaagagagagaacaacctgattctatcatctgactccctggagcccctaaacccaggggaccatgaacttttcagtgtcttgagccagcaatgccctctttgcacttaagccagtttgagctgattttctgtcagttacacccagagatgtcctgagtgatacagagaatttctgtcagtcattcactcactcggacaagaaagacacagtccctgatccacagccagcagaaccgagcagaggtcacagtcactagacaaataattgcacagagtgtcagtcagagacaggagtgacaggtgccacaaaggagaagctggggtcttcaggggagtgtgcaaagaggatcccaatcccaactgcagaactcaggggaccttcgcccagaaagtgaccatgagatcctacaacagctccttcattcctcagttttgctttgtaggattttcttttttgagttcaaaagtcttcactgataccactctgtgggtgaaagaggatatgcacacgcgcacgcagacacatgcacacataaacacgcacacatgcccagaagcacatcccggcacacacagacatgcatgcacccagactcacatgcatgcatgcattaacacacggagatatgcacagagacacatgcagaaacacaccctggcacccaaccacgattcagccatatctggatgcattggacaaatcggattcaaattctagctcccctgagctcccgtgagcctcagggtctcttcctgtaaagtgtggagatggcggtccccctcacaggtgtgtgagcactcagtgaagatggatgtgagtgaaggttttagctccaagctggtcatggcgctagaagtcaccctcatcattaatgaggaaaaagtcatgtctgtatccaagagagcaggtcacatgggaaatggcacccttcctaagcaatctgtaagagtcagcagtcggccctgctggagaccctgacagcatcacggggaagttggggtcttgttcacccctcacctgcaacccagggatggggccgctgcagcagtgcccagggacaccagcagagggcagtggtggccaacagacccatttatgagcacttgtgtgacccccgctagaaatgcctggggtggagaggacatgggggcttttctgggatcccgggaaagtaaatgaccaggacaagactgggtgacatctaggctatcaatgtggccctatttgtacccaaaggttggtgcaaaaagtgcaaagtgcaggtcccatcagtgacattcataattcttccttgcagagggggaataaaactggacctagaaaggaatgaggttgggagtgggggttcaaagaaaccccatgagtgttccccatgcaggaacagcattccatgcccgagggggcagaaggcgctcaacagccgaaggagagccacacatgccgccagccacatgaaaagaccttggccccgctccttctcacccctgtccagccctgaccctgccagaccaggagcacaggcggagaaggtagcagagcaaggagggtggaagacaggccatcatcccaatggcaggaccctggcatccagttggcctggtctggggaccctctcccagaagctgtgagctggacgtgagctttacgttttgagttccagtcacatagatgtcttcacaactgagtgtgactggagacctcggagtctgcccaagatgtccccagaggaagggggtatggcaaggaaaagcaaggcatgtcctagcccagtcactgtctgcggacacaccctgctcctgtgagacgtgggacagggttcccagccaggctctgaatttcagagactgggcctcccaccaccaggccactagcctctgctgggttacagtcagacacaaagccaggaattagattcctttgctggcctgggggccctcgagcaccctacctgagtctgtgagcaccctgtcctctaagcagagcagaagcagagatgcgtccccacctcggggacaagtccagaggggaaagaacttagtcccagtgcagtgtgcagagccagcccctctccacgctccaggcatgctacacacatacctggagcccctcccttcccatctctacctggccagattcttcccatccagtaacggccccttcctccaaagaaccctcctggactccttctttgtgtactgctgaactgcttcctaagttaggcttggaaatggccaattctcaattgcttttgcttaaaatcctggagttctctggactccattgcaggcccttttctctccttgttgtgctcccttccttgggtcattgtatcagtcagctactgccatctcatgctgcctaacaaactgcagggtctcggtggcagacaactgcaagcacatctgtagtttgtgcacttatgggtcactgagggtcagctgctcacagtgaggctggctagggcagtcagctccgtgtgcctctcaacctcctccttggactagcggaagagctggggcgggttcttctcatggcaatggcaaaaccacaacaggaggagtggaaatgtgggcggctccttaaggcctaggcttggaacaggagattatctttcctgccttgttctagaggccaaagcatgtcacatgccaaaacccaagtcacatgactccttaaggcctaggtttggaacagacacattatcttttctgccttggtctaggggccaaagtaagtcacatggcaaaacctaaagtcaagaagctggaaaatatacaccactctgtccatgggagaaaacggcagagttaccaaagggtgtggacacagggagaagacagattgctggagccagccatctcctccagacccgtgatggtgactccccagctgtgcctctagcccaggcctgtctccagagcctcacgttcatctggctgattccctacagaacacagcagtgcaacactctgttcatcccaataccaaaacatttggaaatggccaaataattagtcagcagctggttaaattaattatagtttgtgtgcacaataaaattgttgaaaacaatttttttaaagaatattcatgtaaaaagatgtgcaccataaaaattgtagcatagaatgtatagtataatctcatttagatagatagatagacagagagacagacagacagacagacagacagaaaacagcctggaaaggtatggactgtatcagttaggaagctcttggctagaaataacaaagaatccactaatgtgactttaaaaattaagagtttgtcttctcacatcagaaaaaggtgagtggcagctgctaaccctggctcagcagctccatggataacagctgcagtctctgcaattttcttggtcttaatgatggcaaaatggctgcctcatctctagtcatcacatctgaattcaaggccaggaggaagaaacaaaaggcatctctagcaatgctgtccttttattaagtaagcaaaagctttctcagcaaccctcgcacacttctcattggccagaacttgtcacatggccaccgccagctgcaagaccggctggggaatagggttatttctacctgtacagtgaaatcaggcgatggaggaggaagctgggagctggttggaggacagccgatctgccaagtctgccccaaacccagactgtttgtgttgattatcttcagtgggacaaatgaagcgaaatctccactttttatgttgtccatgtctggaccacttgaagttcattaagaattaatattattacttttacagtcctcttcccagccaagctcctgagattaaaaaaataataataatgagtcttgggccaggcatggtggctcacgcctgtaatccaagcactttgggaggccgaggtaggaggatcacttaaggtcaggagcttgagactagcctggccaacatggtgaaaccccgcctctattaaaagtacaaaagtcagccagatgtggtggcagatgcctgtaatcccagctactcagtaggctgagacaggagaattgcttgaacctggggtggagcttgcagtgagctgagatcaagccactccactccagcctgggtgacagagtgagactccgtctctaaataaattaattaattaattaaaaaaaaatgagtctccacttcctgcctcagcttctctgtgcccacccacccacctttccccatcccctctgcctccacctcctctcgactcctctgaatccccctggagagacctgctgtggccgccctgtagcctaacccaacccaccttccaatcctcctcatcctacgtcacccatcctggttatcacctccgtcttgaaatccttgctattctttccctctgggatttggcatgccatgctattgtgtaagccacgcaaaggaagggacgttctctattttgttcactgctgctgtgtctgcccagaacagcacctggcacgtagtaggtgctcaaggatgtttgatgagtgggcgaatgaacaagtggacagcagaaatcctgcaccccctctgcttagactgccacttctcagtcttgggcatcatggcggcagccatggaaatgtccccgaagacctcttactgcctgcagggggtggaactggccttgggtagccccagctgcctccctttgaaaacatcctggctttcacgcctaaggcacgctctgcccatcacgggcatgtccaggacgctaagatggatcccttctgcaagatactgccttgcagtgcattcgaacacacgtccgtccccttccttcgctttctccttacaaggttctcccagcgtccctgcctcctccccatttccctatctcttgcatgggtgtctacttctccgaggacccagacacccagcatctctcccccacctggctctccagcgcatccccttgggttctctcctcgaccctcctcttctcgtgccaccagctttccctgtggctcctcatccacaccctcgcctgatgcgcacgtgcacacacacagacacacacaaacacacacagacacacacacacagacacacacacacagacacacagacacacacagacacacacacacagacacacagacacacacacagacacacacagacacacacacacagacacacacacaaacacacacacacacacacagacacacacattttttcctaaacctaggtttctatccctaaccctttgtgctgcctccggagtgtcccactggcctgaagcttagcacaaccacactgagctggtcaccttcacctctagccccgctggcccatccatcttaccaccaccccgtcaccggggccacctctcctgggcctcctcctctcccactccaccccgtcaccggggccacctctcctgggcctcctcctctcccactctgccccgtcaccggggccacctcttctggccctcctctcccactccgccccgtcaccggggccacctctcctggccctccgcctctccctcgcttcttttctccttgctaggtcagcagatctttgaggacggagccaggctcacacttctgtggcactgatgctgtcccaccagcacaccgtcgtaagcattcacgattcatgaggctgcttttcagcaaaggagaatccccctttctcttgaactctacaacctttcatctgttcaatatctgtaggtgcctttaaaaaaaaaaaaaacactcacataccatgaagatcacccatttaaagtgaaaaattcaatgggtgtaaaattcaatgtaaaaattcattggatttggccgggcgtggtggctcatgtctataatcccagcactttgggaggccaaggctggtggatcactcgagctcaggagttcaagaccagcctggacaacatggcgaaactccacctctaccaaaaatacaaaaatcagcccagtcattgtggcacgtgcctgtagtcccagctactcaggaggctgaggtgagagaatcacttgagcccagaagacaatgagccgagatggcaccactacattccagcctgggtgatgaagccagatcccgtctcaaaaaaaaaaaaggaaagaaaaggagttttagtatttttacagaattatgcaaccatcaccattatctcattttagactattttcatcaccccaagaagacactccccattccccctagccctaagcaaccacaaacagagattttccgtctgcacggatggatttgcctttgctggacgctttgtgtaaatggagtcgtgcaatatgcattccttcgtgatggcttcttctagctctgatgctgtgcttgaggggtctgcctgttagatcccacccgtgaaagggaaaacagggcaagagctggccctgctctcacccagccagggaccaactcagacaccacacgagtcgttgcagagtccaccggagacgtctgggggctctgaggaatgggtcagggtgaatgacaggagcgggctgggaaagcaagagggctgcaggatgggcggggagggggggtgttggggacagcagggagagtcaggaagagcactgggttggggaacagcctgagcaaaaggtctaatatgggaaggaaatgaaaggaagccacacgccagagactcagaggaaaggagcgtggcctggaacaagatccgcaaagaagccagcgggacagggggagccttgacctgtcaaaaccatcaggggtctccacgttatctgaacagcaatgggagccatggaaagtctgaaacagaggggtgacatgatcataaatgtttttggaaagatcaccctggtggtggggtggagaagggaaggtggctgggagctgtatgtccatcttgggctgtagggatgagagagagagaggaaggagtgggtggcaccattctgagatggggtgggacagagccacagcagcccaggagcaggctggggggtggacaccctctgattagtattctgcacaatttggggccagagcagctggtgactttcaggccccaacctcattacttaaggcagctccgcaatgagcttacacaggcccctcatcagccccatccacattgcctggatcacttagaatgcatctggttgctcccatgagcgtctgccacctttttgctattttatgtcatcagcaaactggcgccgtcgtgaaattatgctccactcccggtcaatgcattaaacttaaacgttttctataaccagtgcgccctgtgcctgccttaattcccaactgatttatctacccgatttattaccagggctcaattcaatcaatactggctgggattccacccgcagaggcatctgatttatgcaggagacactcctggggtgatttagagtcctctcctccaccacggagcccccaggcccccaaaattgatgtgtctgccttgctccagggagaacttgcatcagcatccaaacgacccagccacaggccctcctggaggcctcaggctcccactccctgccccaaggggcctgcagcccttgctctggagtgccctgggccggccctgacctcagagctccctgggaaacgaaagttccagaaaccatgaatgctcagggttaatctgggctttaggctctggggagagggaaggcatgcatgccctgtatgaactatgtcttattgcactaagggcagggtctaaatcagatccttatctttcattccggacacataaaaacaggatgttggggtttcttatccccaaggatttagcaaacttctactaagaaaaaccatatatatatgtacatagcacaaaagattccagacaagattttttttttccttcccaaaggaggatcatggggtctgaaatcaaatataagaggtcaaagtcttccctcttgaacttgttctggcaaaagttcaatagaacgacatcctctggttctaattctaaaccttcctaggggacacagcagagggcccgctccatctacagccgttctcaaaataaatcaccagcggctcatggcaacaggagttattaaaatatgaaattatttggtgcctccatgttcttgacttccccttctctttgtagtcaggaggaaaagcctaaaccctgatgtattggccaatgcctcaggggccaggcaagttctgtaaaagggtacaaggctgagcagaagaggccagaagggaggagaggggcctggggaaaactcaggaagggggcagctgctcctccacccccggcaatcgttgcagggaaggggaactccagataccagggttcttggccttgccaaagacttgtgaccccagaacgggtacctagatccagtgctatcaggccatgtaccaagtgtgctgggaccaccgatagctgatccacaatgacaatcacacccttcccaagactcaccaaagctcagtttaccgccagcccagaggcacgaggctctgagtcaatatttgcatttgcatcaaagtcatacttccccatcttctttttcccgtctgacccctctcctcatgtgggagtcaagccatggtaccactgctctgggaaggaggggggctccaggaagcagaggaaaaccaaagttggttcttggcttttgggcttcaaaagtctccttcttagagaagaggtgagaactcaggaagcacagagttggggaagaactgatgggggcggtggagcttcctagaaaacttgccctcccactaggaagtgcattcttttttttttttttttttttttttttgaaactgagtctcactccgtcgcccaggctggagtgcaatggcacaatctcggctcactgcagcctccgcctcctgggtccaagccattctcctgcctcagcctcctgagtagctggtattacaggcgcctgccaccatgcctcactaatttttgtttcagtagagatggagtttcaccatgttggccaggcaggtctcaaactcctgacctcaattgatccacccgactcagcctcccaaagttctgggaggtgcattctaacaggctcctgggtaaagctgggcttctgctcagactcactttgagaactgaggtgctagaagctgtgaaagaaggaccctgaaggaggatccggaatgcatcagcagaatcccagcagatctcccagctgggatgagtgcaggccagagagtaaacaccagcccagcggggacttctggttcattctctaccttgagattaaagttaactaaaaaaacaaaattaccattttaaaatgtgagtcctgtattctcaagtgggattgcggtgatgattgcactagtctgtaagtttatgtacatttaaaatatgtcacatcccattggccaaatttggaattacctaagtatcaaaaataataacaatgactgtaatggtggaaacacactgaatgcataagtacccaagcacctgtaatgatcaagaactaaatggccgggcgcggtggctcacgcctgtaatcccagcactttgggaggccaaggcgggcggatcatgaggtcaggagatcgagaccatcctggctaacacggtgaaaccctgtctctactaaaaatacaaaaaattagtcgggcgtggtggcgggtgcctgtggtcccagctacccgggaggctgaggcaggagaatggcgtgagcccgggaggcagagcttgcagtcagccgagatcacgccactgcactccagcctgggcaacagtgtgagactccatctcaaaaaaaaaaaaagaactaagtattttcctgccccttcagttggaactgcctttcagggaaaccaaatagctccagagggtgaagtaaagctcattttgacaaagaatgccagctaacgaaatgcagaagaagggacagaattataaaatcgccactttgcaacatccatgaactaattggctcggtcaggagcatcaatttaatcaagggtagatggagacagaccacaatgagacaccaactccctcacttactggggtgctcactggggtgctctaaccgaagacagacaatgacacggactgatgagcatgtgaaggaatccgaacctcgtgcactgcgggtgggaatgcaaaagggtgcagctgttttggaaaacagtccagcagttcctcaaaggcctgcacagagctttcacgtaactcagtagttccactctgacatgttacccaagaaacacgttttgtgggaaaacacatgttcccacaaaaacctgtacatacatcttcacagcagtattgtttatgtagccaaaaagtggggacagggagacaaatgaccatcaactgatgaacagatggaatggtccagtcatatgaggggttattaataagccataaaaagacatgaagtgctgatctctgctaaggcctggacaacttggaaaccatgatgctgagtgaaagaagccagagacaaagagtgagtgattccctctataatcccatttatatgaaatgtccagaataggtcattccatggtgacaggaagtgaatcagtggctgccaggaggtagagggaggcagaggcagggagtcctttgggaatgatgcaagcctgttggaaatacagagagaagtgatggttgtacaacatcctggaaactattgaattgaattgcatgcttttaatgggcaaattgtgtagtatgtgaattacatttcaatagtttttgttttgttttgtttgagatggagttatgctcttttcacccaggatagagtgcactggtatgatctcagctcactgcaacctctgcctaccaggttcaagcaattctcctgcttcagcctcccaagtagctgggattataggcacacaccaccatgcccagctgattttttttgtatttttggtagagacggggtttcaccatgttggccaggctggtctcgaactacctcaggtgatccacctgcctcagcctcccaaagtgctgggattacaggcgtgagccagcacacctgtcctcaataaagctgttttttaaaaggcagccaggaggatgaacattggatgactgcactgataggaggtccctagagtagtcagatttatagaaacagacaaaatagtggctgcagggaccaggaggaggggctggggagctggtgtttaatggttgtagagtttcagtttgacaagatgaagttttgtggatggatgacaatgatggttgcacaacagtgtgaatatactttttttttttttttttttttttttgagacagagtcttgctctgtcgcccaggctggagtgtagtggcatgatctcggctcactgcaacctctgcctcctggattcaagcgattctcctgcctcagcctcccgagtagctgggattacgggcacgtgccaccacacccggctaattttttttatttttagtagagacggggtttcaccaagttggccaggctggtcttgaactccttacctcaggtgacccgcctgcctcagcctcccaaagtgctgggatgacaggcatgagccaccatgcccagccaggtgaatgtacttaattccatggaactgtactgttaaaatagttaaaatagtaaatgttatatgtttaccatcatagcaaaaaaggtaggtgagaaacaggatactcacagggtgagaaagaatcatccagaattacttgctacacccaaagaagggtcttccccatgaaggggcagctctcagagcctcagggttggcaggctggcagtggaacccctgttgtctgtgccctgtggggaaaccctgtaacgtgcatgtcatcacccacagagtggtctggtgaaggatggtccacctgaatcagattccacctggagattccacttcctaggaaatcgggggagagggggacaagtggaagcgccccacacaaatcagatgcactcaggacacagggtctgccaccggacacccagttggccttctcaacaggccatgtcatgaggtgaatcactgttctgggttgaaagaggctcaagagccaatacaaccaaatgcaacagctaaatgagaggaagctggtttgaaacagctggcttcccaggcatttgaagagacctggggagagttgactccagaccagttagcggatgctgtggaaggctgaaaatggcccctcaaagaagcctgcatcctacccctggaacctgtgaacatgccatcttgtgctgcatacgggactttgcaggagtgatgaaggacctggagctggagagatgatccttgcccaatctaatcaagggaaattcatgaaggtgagaagaggtggtaccagaaacaaagtcagattggtgtgaggctgctgactttgacagtggaagaaggggctggaccagagcccagaaacggggctgcttctagacaccaccagcaaaggccaggaaataggtaccccctagagcctccgaggaaccagctctgcagggtttagtccagggagatccattttgagcttctgaccctcagaactgtcagatgacacattcatgctgttttaagacactaaatctctggtgatttgggacagcagccataagacaccaatacaggtgctctatgggagttcctattaactcgatagagtgtgtttagtgggagaagaccctgatctgagaaaacgcaggtgatatggttttgctgtgtccccacccaaatctcaccttgaattgtagctcccataattcccacgtgttgtgggagggacccggtgggaggtaattgaatcatgggggtggatctttcccatgctgctctcgtggtagtgaataagtctcacaagatctgatggttttataaaggggagttcccacgtacatgcttcccttgcctgccaccatgtaaaatgtgactttgctcctaattagccttcagccatgactgtgaggcctccccagccatgtggaactttgagtccattcaacctctgccgacacctggatatcagacttctaacctccacaactgtttttaagttattgagtttgcagtaatttgtgacagcagccacaagaagctcatagggtgacttacgcagagcccttgaactccaccataggtcttccccatccccagggtctcctcctgggtaaacgaaccaccattctctcggtcactccatccacagagcagggtgcctgctgggatccccactttgctccaatcccatacccatttttctggggtgtgccccctcggctccatctcccctgacagtccttctggcctggctgccagccgctctcacctggacagcagcattagccctgactggcctaatgaccccactcttgcctcctgccaaccattcccttaaaaatatggagaaaatcacaccgttcccctcctaagcccgccagtcactctccactgctcctggaacaaaatccaagcccatttctacggcctctgtgggattaagacgtcggttccaattcttcagcctctctgcctctgcccctcgccgtggcctcatcggagggaggcatcgctccctgaccctcgactttcagcttggccactcgactcgcttggcttcccacctacagccaggagtgacggcataacaggtctgcgcccgcccctgaagacgcctcccacgtccccgctccccacgtccgcgcccacacctgaagacgcctcccacgtccccacgtctgcgtccgcacctgaagacgcctcccacgtccccgcaccccacgtctgcacccacacctgaagacacctcccacgtccccgcaccccacgtccccacgtctgcgcccgcacctgaagacgcctcccacgtccccgcaccccaagtccccacgtctgcgcccacacctgaagacgcctcccacgtcccgtctgcgtccgcacctgaagacgcctcccacgtccccactccccacatctgcgcccacacctgaagacgcctcccacgtctgcacccacacctgaagacacctcccacgtccccgcaccccacgtctgcgcccacacctgaagacgcctcccacgtcccgtctgcgccgcacctgaagacgcctcccacgtccccactccccacatctgcgcccacacctgaagacgcctcccacgtctgcacccacacctgaagacacctcccacgtccccgcaccccacgtccccacgtctgcgcccgcacctgaagacgcctcccacgtccccacgtctgcgcccgcacctgaagacgcctcccacgtccccgctccccacgtctgcacccacacctgaagacgcctcccacatccccgcaccccacatccccgcgtctgtgcccgcacctgaagacgcctcccacgtcgacgcctcctaggtctccacttcccacgtccctgcttgtggagcctgtgccccggccgacctgctggtgccaggacagtgagagacgcctgcagcagagctgcccagctgcaaccagcctggacccctcaggcccccgcagacctgctggcctgttagtagaaacgctcagctttgtttacgcagcaggactgtggcactagctggccacacagcccctgaggcactgcctgaccggcctctgcccactgttctaaccctgtcttttacccctatggccctctttggtaaccatcctctcatgtcagcagcttctggaaggttctaaacctgccagattttccctgttcctcaagtctcggtgtcgtcttacctcctctgggcagccactccagcactgcgcccacctaaatccccctcagtcaccctcggccacgtcactctgtggattccttctgggcacagcccagccgcgctgtcttctctcaagctgtcctgtcacccaagcagctttgtgagggcaggagctgtctctgcagatatcaagtggaacatcacctgttttctggcatttcagctgaagcccacagctgagaactatccgtgaatccaaagagaagcactttactgggacaaccccacttgccaagagagaccagaggccactctgagacccacacccctcccctcccccagccagccactactttctagaaggttagaaactcagtgcaaggcgtgagggtttcttgggagagggctggcatcctgcaagaatctctgcacatttccttaccttccccaccaccaccaccaaaagccaagcaaaggccatcagagacccccccacatggactggggttatcccagggaagcccaccatctcaccctcgcccagggggtttgccgagtgggttccagagcaggttctagggagcaggccatgcttcaggaattccgtaggacaagaacaaggaccgttttgtcatggaccaaatggacacagggaagccaggctaggtggcagtcaccagtgtgggcatcccgaatgggggtctccaaataccggccaagtgcctgagatccccctgacataaggcattggatggtcagggaacagccacattcagtacccgctcagctaacgcccttcagccgcccaccttcttcctgcatcccgggcccaccctgaggagctgggcaagtggagcgggaaggggaaagccagcagagatgtcccagtccctctgcatccgcagcctggccccctgagctaagggaaaagggccactttggaagagcaaatacagcttttatttgaagcaggctggatgttttaagatctgcaaaagatgactgttgatgggcagctgtaaacagccctacctagattgccttgtgctcccaaaggcgggttggggggaaagtcagcacaggtgtgcagggcagtggtgggaacaatgagaccattttctgatggccccaggggagcttcccagcgcccagaggagccgactagcccacaagtgctcaaacagttcatttgctgaatgattacgtgggagtgaggtagactctactccgcgttctagggcacttatttgtctcttcctgtgaagtgcagctccacaccgcagggcagggatccatttctcctcaaagccaggagttttggttctgcaagcctctgtctctacctgttgggtgggaaaaataatacctcactgggtcactacaagattgaaatgcgatactttatagcgctggcaaaaccagactgatgaattttttctttatttaaaaataattcttaaaccatttgtgagatgagccaggtataaaatacactgcaggccggggatggtggctcacacctgtaatcccagcacattgagaggtcgaggcaggcggatcacctgaggtcaggagtttgagaccagcctggccaacatggtgaaaccttgtctctactaaaagtacaaaaagtagccgggcgtggtggcaggcgcctgtaatcccagctactagggagactgaggcaggagaattgcttgaacccgggaggtggaggtggcagtgagccgagattgcgccactgcgctccagcctgggcgacagagcaagactctagctcaaaaaaatagaaataaaaatgtactacagtttggtgaaagttagaagtaaatcatgaacttctttgatgatataatttggtaaaaaatattaattctgacatgtgctcacttattttaaatgtcagcccttccctgcatgccacggattatacccttatacctttcagtccacaagagaccacatatatgacagtggtcctatcagattataatggagctaaagattcctgttgccatagccatcatacagttgtagtgcaattacttttttaaacaaatgtagtgtaacctaagtgtgaagtgctgataaagtctacagtagtgtacggtgatatcttcagtcttcacattcactcaccaccctctcacttactcacccagaacaacgtgcagtcctgcaaactccattcatgtatgtgccctacacaggtgcaccattctgtatctttcatattgtagttttactgtaccttttctatgtttagatatacaaagacttaccattgtgttacaactacctacagcagcggtccccaacatttttggcaccagggacccatttcgtggaagtcaatttttccacggaccagaggggagtgatggtttagggatgattcaagtgcgttatatttattgtgcactttatttctattattattacgttgttatatgtaatgaaataattacacagctcaccatcatgtagaatcagtgggagccctgaacttgtttccctgcaactacacagtcccatctgagggtgctgggagacagtgacagatcgtcggacattacattctcatcaggagcgcacaacctagaccctcacatgagcagttcacaacagggttcgtggtcctatgagaatctaatgctgccgctgatctgacaggaggcggagctcacaatggggagcgcctgtaaacacagatgaagcctgcagctcacctgctgctgtgtggcctggttcctaacaggccacagaacaatacccctctgtggccaggggttggagaccccggcctacagcattcaatgcagcagcatgctgcacaggttaagtaacctggtgtaggagcaattggctataccccatatcctaggtgtgtgtgggctctgccatctagtttgtgtaagtactccctatgatgtttgcacaacggcaaaatcacccaaggacacatttctcggaatgcaccccttttaagtgacacatgactggtaccttgcttggggagaatgatgttgaggatcttgggcttggaaatacctaggttagcctaattccttcttgcttttcttgttgcagcgcctcctgggtgaatattaattaatatattcactaggattgaaaggaaggtcctagacttttcttccctttaggaggacaagtttaaaaaaatggaatttatctgtaaagctggctagctcttatccctgaccctaaaaacatagtctgtaagccccccgcccccgcccccaccggggaagactctttggactggaggaccgtgtttctctctaaattcttacactatgaatggcatgtgaaaataatatccacgtggttacatatttttcaaaacagtgtctactatccaaagatcaacagagcacaaaagtaccaagagtggaaaatctctggtgtataacggcctaacgggaaaggagaaaattggggaatgcaacaggatctgcaattcgggtgggggcggatggacgcggatggacggcccgcctggatccgcgcgaggcgccactcggggagttgatctgcggtctcgcagtgacacctacaggccgccgtggccgcgcacctgcggcaactgcgttcgacagcgccacctggcgggagccgacgccggcaggcccggagaggattttcttcgtgaatccaagacagaggggtggaaagtgctcaggacctctggggtgtgtcctgtgggccgctggggctggggtgcagcccacgaggaagtgtccgtggggtgtgcgtacctgcccgtctatcctgccctctgcactgcctggccgtgctcagcccaatgtgcctgtcccagctggatcctggccgggcagggccgtcgatgctttgagaatgagtgctggtattttctgccttttacaagtagggaaagaggggagttggaggagtaaccgaggtcgtagcctccaggaaggcctcccgggcaagctgactccagaaccaaaatactcccccacctgcctcccaaaggtggtggaacctctacttttgccgctcagaacagtcacattcagcttcatcccgacaggcactcgaaactatggcagaggggcaggcatcctcactctgccacctaggtgctgtgtgttgctgggcaagttgctaaccttctctgagcctccatttcctccgtgacaaatgggcatgaaagagaacgtgctcagtgctgctcagcaccaccttcccagggattttgtcagaaatgcagagtctcaggccctgtcccaaacactgagtctcgcatccttgggaggtggggcccagcaatctgtgttttaactaagcccgcttgcgactgtgatactaattgagaatgtccgccttccagggtcactgaaaagaccaaataagatcacgtgtgcgggatgcctggaaaatactcaacacacgactgtcgtaattctccaactctagacagcctggcgtgggggccggggggagcattttctcttttccttcctttttttattggttattatttcttaatacagggtgtcagtccgtcacccaggctggagggcagtgctgtgatcacagctcactacagcctcgacctccccagctcaagccgtcctcttgcctcggcttcctgagtagttggaaacaggtgcatgccaccagctaattttttatatttttttgtagagatgggggtctcactatgttgcacaggctggtctcgaactcctgggctcaagcaatcttcccacctcagtttcccaaagtgttcggattacgggcacgagcctccacagcctgattttttttaattacaaaagtaagacatgctgttaaacacagaattaccatgtgacccagcaattcccctcctaatgtacacccaaaacttgaatgcaggaattcagacaaatccttatacaccaaagctcatagcagaactattcacgatagccaaaaggtggaagcaacccaaatatctatcagctaataaatggataaacaaaacatggtatattcatacaatggaatgtcattcagccataaaaaagaatgaagtactaagacataccacaacatgggtgaacctcaaaaacattatgctaaaaaccaggtccaaaaggctacatgtgcctgggcacagtggctcacgcctgtagtcccaggactttggaaggccaaagtgggtggatcacctgaagtcaggagttcaagaccagcctggccaagatgatgaaacccgctctctactaaaaatacaaaaattagctgggcatggtggcatgtgcctatagtcccagctactcaggaggctgaggctggagaatcgcctgaactcaagaggccgaggttgcagtgagctgagatcatgcctgtgcactccagcctggatgacagagtgagactccgtttcaaaaaaaaaaaaagcaggggagctacatattgttatgatctgatttatatgaaatattcagagtattcaaatgtatagacagaaagttgattggtggtcatctagggctggagggaggtgtccggggtgaatgcaaatgggtatggggtttatttttgaaatgatgaaaatgttctggaaatagtgtgatggttgcacaacatcgcgaatgtactaaatgtcactaaggataatgttgtgtgtcttttgccacgataaaaaataaaagaagggccaggcatgatggctcattcctataatcccagcactttaggaggctgaggcaggcagatcgcttgagcccaggaattcggcaacatggtgaaaccctgtctctattaaaaaatacatatatacaaaaaattagccaaacacggtggggcgctcctgtagtcccagctactcaagaggctgagatgggaggatcacttgagcccaggaggtcgaggctgcaatgagccgtgattgcaccactgagctccagcctagatgatggagtgagaccctgtctcacaaaaggagacttgccggttgtaacaatttagggctgtgtaaaacagttctcttgccctggagcaagcaatgctaacagtttggaggtatacctttgacatcattctttgtgctcaaataaacatatatagacactagagttgtctctttttagaaccgtgctcatccacatttcttgggccacttgctgtttttcacttagtgatacatcccagatactcctcatgactgtcccctggcctgtacatacagatcaagtcaggttttcgtagctgcaaaatgtgccaccatccctcccgcgtgtgagcatgtagagtgtttccaggcacctgctaccataaacagcagtcacgaacatttgtgaccgggtctcattttgtacaggggtttcctctctgtaggatggatttacagaggtgaggcgctgtgctgtcgtgggcattctgaatacgtattgtcagacagcgatcaatcctgcaggaagatgggaatcggcaagctcccccgtgcggcgctgacatgtttcccaggcgcacacacgtgcacacacacacacacacacacacacacacaccccacagccccagatgttatgagtatttatcatttttccaattgtaaattggtaatgaaagccagtcaaatgagcgtcggtttgattactttgacaattgctatggttgagttccttgttttgtgagcaggttttggtaccttggggaagggggtggtccacagaccctttcaggatataatgaggttctccccagaaaatgtgtacagacatgcacattttgcagacaattccagggattcaggcagaaaagcccatctgtgaggcccctttttcaaagtggcgcagactgcggcgtttctgacatttccgatgaacacaaacacgagtgtttgtctaaatgttaatgggtttctgtgccctctgctggaagcatctgcagtcagtgcgccactgcggaggcagagcccagtgactggaattttcctcttgccttagagctgttttcctctcctgcagaactggccctggagtttcaagttcagtacgcactttttccaagttgctgagaaagccctctgcctcacacccaaatcagcaaatttaagggaaattatttatctcccactttggggattattagttctggacagagactcttactgtataaggtttgctgaaaatgtatgaggctatctggagacgggtggaggggggtgtattgaatcccagtgagtaaacattttaagcaaattaagtggttgtagcaataataataataataataataatggctaccatttttcaagcgtctgctccgtgccaggcatttaatccctccaatgacaggggccaggttttaaactgatgctctgagaggtgccattgtttggcccaatgccacacagcttgtggtggaggaaaattctaaactggatctgccagactgcaagcccaggaccctcccactgcacctcggggtcacgctgacaagggccttgggtcttgagggcacaatccacactggcagtctcctttcaccaatgcaaaccaggtggggatgctggtgacgaggcccacatgatggataaagactctgaggctcttgggaagtgaccatttggtccaaggtcacacaactgggaaggaggagagaaagggatagaacgctggcctgcagtgcactgaaaacaagacagtgccgttacatcccagcaaaatactgctaccagcaaaacactgcgctccattgatgtgtttttaggagggagattagcgagggtcagggaggtgctggatctgtactagcacaaaaaggaaactttatccttgtggatactgaaaggatcgagagcaatgtcaaaagggattgcctttcccacccagtgtttcagtgtcacttaatacagagacagggaccacctgaagtcccctgaggcgccaccagtgagatgccctccctgctttctgggaacccctgggttagtgaatatgcttcaggcaagggagtgccccagtctgagatggagtgaggagacagtggcgagagcccagcatgcagctgaaggccccgccgagtcatcttcggagggagaaagcaaagtgctgaggactagggcagagccccagagacccaggatgtacagaagcccagaggggcagccccaacacccacctcccggctgcagaggctgctggaggttccaccaatagactggagtgcagaagaaaagctcagcatctttgtttcaccacctggaaggctggatggccaggtagccgggtctgctaagccagtcctgggcgagaagttcaagtcaccttccaacaccacagttggtggcatctcttttacaatttctactgcattgacttccagaaaggaagcaacttacaattcaacacctgtatgaggcagttacttttttttttttttttttttttttttgagacggagtctcgctctgtcatccaggctggagtgcagtggctcagtctcggctcactgcaagctccgcctcccgggttcacgccattctcctgcctcagcctcccgagtcgctgggactacaggcatctgccactacgcccagctaatgttttgtatttttagtagagacgggctttcgccgtgttagccaggttggtctcgatctcctgaccttgtgatccgcccgccttggcctcccaaagtgctgggattacaggtgtgagccaccgcgcctggccagcagttacatttttagaaagagagataactcattcaaggaaagataaaaggcaagacgggggtggggacattggatatttgccccaggtgggcattaaccttggctctgagcctcctggcagccaaggcaagtggaaacatgatggctcactcagctgccatcatcatctgctcatgacaagtatgtgcatctctccagtgggctccggcctgacaggctggcgtaaggctcatgggtgagcaatgtccctgacagtaacgaggggaggaagaagactccgcctttatgtggcctccaagaaatccaaggatacacaatggcatttccatggggccactaagctcaaagggtcagatcatcaatttttttggtgatcaaaacttgggagcccaggaaaggcaccaaatgggggtctcctatctcccctctcaccagtgtcaataatttcacccatgacttcagcaagattttccagttgaactctgagaccataatagttggcatctactgagtgcttcccacctcccaggccttcccagcaagctcagtgaccaggattaccctccttcctcctctacagaggactcttggctcagagcagtggggaattcacccaaggccacatggcagagccagtaagatgcaagccaagatctgtgctgaccccaaagcctgtatccccacctccgcacaggcagctcttcccctctggtgactgcaagcccagccctacctggggatgccagacgaggcaaaggaactggatgtcagggcctggaagaccagaggaagctcgtgtctgccctacacagagcagagatgtgcctgaccaccatgccggcccacctccagggtccaacaaaaatgcttgagattgaccccccaacacacactcaaaaaaaactttgttggctcccaaaatgtggggaaaaaaaccttcaaaataacgtttaatgaaatatctacaaaatgtaacatatcacccaatggcaactcaatccttctatggctctggatatattttatttcgtaagtgatacagacttgttgaatataaatagaatgtcaggattgtctaaaatgaagcgctccccaggacctacgagtgttcagatgaccctaccacagactgagcaaaatgtcaccatgaagagtttgggacctgcccaatgtctggccaagtgcttaattgaattgggggtagatgaagatagaatgcttgcccccagaattttacatataggagtcaagcagttggctctccaaacaacgaaggcagctgggcagagctcctggcaaatgcacaactttgagtaatgccacttgttaagttaaaagagtgcctgcatcacccccctaacacttcattagctaaatggattgccccattgggttggggttgcttaatatctgcctattgactttgcagaacgtctgccaagaacaagatctcagttttgacatagttgatgctgagctatttttttcctcgactattatttgtctaacagagtgctgagctgggtacagccacgtacactgagtgtaaaaccacatcatcaacacagatcttacttgctatgacagcaggaaatgcagccagttaatttaaaagctgactccagttcttgggatggaagtgggaaagggtggccaggatacagcgccatttcccattcccaggaaaactgcaatggtcacaagactactgccacacattttgattccaaaagttgcttagaaggtagagctttagagaacataaatggtctgtgggaggtgggagagtggaccccacacgccacccagtaagacccgtggctactccttcactgtggcatcagagtcttggattgctccagagagattttggttgtttctatcacgtttctccatgaaatgaattagagtttgacagtgagaggcagtcacatgggtgtgccccacatcttctcactccttttgtagcagaccacgttcttcaaaaattcaagccaaattttaaaaatcaagagagatctggccgggtgtggtggctcatgcctgtaaatccaacactttgggaggccgaggggggcagatcatgaggtcaggagttcgagaccaacctggccaacgtggtgaaaccccatctctactaaaaatacaaaaattagccaggcatggtggcaggtgcctgtaatcttagctactcaagaggctgaggcaggagaatcgcttgaacccaggaggcagaggttgcagtgagccgagatggcaccactgcactccagcctgggcaatagagcaagactctgtctcaaaaaaagaaaaaaaaaaatcaagggagatcctttcaaaaagccagatttccaggtctggagagttctagaaagatctagtggcctctgcctttcatttctgcaggagtcaagtctcggtgctctcttcagacagctggcgccatccttgtctttccttcttatttcccacgcccagctcactcgtgcactcggcaggctgggaccctgtaggaacaccaggcacatcctgcaatgcggtataaggttttgcaatgcaaagacctgagagttgagcatagacactccaaggtggtttgctcaaaggaaagaaggaagggctatcccagtgctggcaggaaaaggagaactctggcaagaggagactgcatggaccactggagatgggacaaaagagaaaatgtgaccagcctgattctcatcttcttttacactgtttcctccccatctagcaccaacgtgttacctttcaacaagagtaataagccatcccttctggagagtgtgtgtggacagccaagctcacccagcttcccttctgcccccgactcaagaagcagacccctcaaagatggctcaggaaacctggaacattagctgtgggagcatttagttccatggctttacagactgaaattcacagcccacactacacacgacctcctgacatttgctggcacttgttttatacaataacaatagtgctattatcattattgttattactcctattatgccagtgcattagacggtccccagaagggagagaaggtaattggctcccatcaccctgagcagcgctattgggtacaatgtgcaaatagcttaaaattaaaggctggcattagagcctgttcagtctgtaatggattactaaatgagcacaggcttacctactgccatcaacaccctccagaaatcatttgcaaacaggacagataatttcgtatctgattcaggttaattgccctgttttcctgcctccctgctcaccaagggcccccatgggattgaactctgcaaagttgcccaaaccagcctcagcgggcaaacgttcccaccaggagctaatgaggggtcatcgtcatcttctcagacctaaacccagacttgaccctctgcaaagcattcttcatgaccaagtcattcagatcccttatccccgactttgctatccggtggaggaggaccatctgcctctcgctcagtgtgtggttcaggcggtgtgcaatggagatgggggtctcccccttggcatctctgtcgtggatggaggccccgtgctggagcaggaggattatacagtctgaccggcccatagctgcagccacatgcaggggtgtcctgcccaggggggatctgctgaggcagctggctcctgtaaaataagaacattggccagaaggaagacatgcggagggggaacacaggaggggtccagggctgtgaagggagtgctcctcagggaggtcctgctgcctggcccagctccagtactgccctgcccccagtccactcccctggcagcagccagtgatctttccagaatgcccatatcaaactcctgctcagatccatcactgccatcccaccggctgtggggtgatgttctaggtctttcccgctcactctcaccctaccttcccattactcttccagcattccctcctgccatactctcctcccccaccccaccaccaaggcaccaattatacctaccttccaccttcatccctaaaacacaccctgctctgcatcctgccccaggcccattcacaacattctcacccattttattctgggctaaatctgacctttctttaggtttcatttctttccttgggaaaatcttccttagttctcccaccccatgaaacctcctgtgtaagctcaatagacactctacatcttcacaacactgtgtacatcattgactatggaattatttgtaataatctactgacttcccctcataaactccaggagggcagaaaatacacacatctggcttgttgctgttctcatcccgagcacatagctcagtgcctgcagaagacaggcactcaggaaatgacgcaatgggcagcctgactcatggacagatttcacttcgattaaattccccaccgcctcctgcagatggatgggctaatgacaggtgtccaatatggagttgttgaattgaatcaaattctggataacaaatatgacacagaaaacaaggcaattcaattaaattcagctgacatttcagtagccagtttttatgagctccggctggttggtgaggtaaagttttaaataggctcttagaacaccagtgtcgaccatgacacctccccccagcagctgtctgcagaggacagaaaactttgcaaagctggctgtaattttttaactggtgccttcaaatacatcacagttctatcagagcaaaaatgactttttatgagcttaaaggactgctgggctgcgcaaagcccatatttcattttacaacaagcaaagagcagacaggcagtgaaggaaggaaggagaatattgttgaggtaacctttacccatcacagaggtttgtacacccgatgcacggcccaatcatccggcccaggaagtccaagatgttttccactttgcttggtgtaagtgggaaaaatagcaatgactgagctgacagaggctggagccaaggctgtgagtaggaaagaaaggggtctaatttggaggcaagttgatacaggagacccatgggaaaggcccctcctgagcccaaaccattgaccaaacaccacgtaacatgttctccctttttccaaggaagctggtggtctgggctgttacagctgttctccattgttcttgagggtctaggctgttaacagctgttctccattgttctccactccgcattgagtggtctgcatctccatcaatgggcatcttttcccaaaaatatcccacatccagggaggatagagtgtacacctatggaatactatgtaaagctctttaatttggagacaatgttggctaaggcttctgtttctatctatcaagagagccagagagagagagagagagagagagagagagagagtggaaggaggcccttaagtggaggtgggttgaaaagagagttcagcatgaatgtcttgtgagaaaataataacgaggcttggagaagggagaatggtgatcctgccatccaccacagagctgtgctggctggaaggtggactattttggggttttttctagtgtgtgtgtgtgtgtgtgtgtgtgtgtgtgtgtgtgtgtgtgtgttgtagtctcctatctcagcctcctgagtagctgggactacaggtacgtgccaccacacccagctaatttttgtatttttagtagagacggggtttcaccaggctggttggccaggctggttgtgaactcctgacctcatgtgatctgcccgcctcagccttccaaagtgctgagattacaggcatgagccaccgtgcctggccagaggctagaccatttcggaccattgcagcatcctaatttcatgcgaggctggaaatcacacagacagcatgcgaatattcccagcaatgtgtctggtgagaaatgaaccagggatcctttatagctgccgcctgtgtcttgggtcctgaaatttctgcctcactgaagcagaaagaatcttctcgagacctggtgaagagaaggagggcagcctctgactggcgtgccctaagacacttgcctagacagggagtgagtggcaccatggggaccctgactggtggctgacaagacacaggtccaggaaaccactgctggaaggactgggaacacaagacactctgtcctttctacctgcaaaaaatcccaactcatgaatatagcaagctttctaccagaattaccgtgttctagaaggtactgcacagcatcaaagtggcctctgtgtgaggccacatacaacgccacaaacgccctctgagacgtccagtgcttccacttctcaccctcaaaatgttctgaatttgcggttcggtagaaggaatcttcagtaagcccgagacaagatagctgggcaagacaagaggagtttgagttattctcaaaagcgtggctacattttgctggacggctgatggggcatgctcaggggaaggcttgcttgaatgtcaaattaaggctcatgatgggaaaagagaggtgcaaaccctcatgaaaagctgagaaacacccaggacagcatggggaggccatgatttaatgctttatatatgttcaggaaatacgaattcgccgtcagtcaggctcggaacacaggaaggtcttcctgtcaatgttttgaagagagaaaatagctttgccaggtgtccacaggaaggtggttgaagccactgaggaagacaccagccaatataaatggcctcccagagggtgacagtcatctcttggagaccggatctggctttcccgtctatttgtgtgcccactgtctccattaggtttcagagcaagctgaacatgcacaggtgaacagcccggtcacgtaaccacctcgtggtgaattaagtctttgagcctgggaggaaggctacgggttcccccagggaggatactctgccctgatatgggagtcaggactggggcagtgggaggatcagaatcgagacgaggatgatggcaattctgacagcctcaaacagcagggaggtgacccctgcagccagagtaagagccagaaaaccaagcatggaccacactgctggtgacaaagggcagggagacagaaggggcagaggagagtgtggaggaggaggagcgggagggactaggagatgtgtcagggctgggacagggccccatcctgcctaccctccctgccaaggctgcctcctgccgcacctgccccgagcccacgcactcttccaagagcgccaatcccagcccctgctacacccagccttccctgacccctttctgagcaaagaaactccatctcttcttctccaggagcacatagctttccatccgaatttcttttctaggaagaatatagcattgcccctcgtgtcacagtgattcatcttccctgttgggtacacatctggtttctatcctcctgccccccactgcccacccctagagcccagctgagaggccagcaggagccctggaggacagagcgcccgccgctcaccccgggaacgaggggcctctccctccggaaccaggcagcacctggcggaggcctgtaccacagccccgagctctgagctgtacgcttctcagttatctggagttctcctctcagtattaaattagatttccaaccttatcacttataaacatgaatagaaacgtgctgcctcgactcctttgcggggaggggtggggcggtaagtgggttataaatcacaaatcgataaacccagcaaaatggtaaacccaaggagtgaaggcaaaccctcagtgcggtatttcataattatgacacggctcatcgttctctcttccctgctctgaaactgttattcacatatccgtattaaagactaattttccccccacaatttacggttgcttcgtaacgtataatatccatttaaagaagcttgaaaacaccttgctgggatccccttccacagccgccaaaacaagttctgtccatccgtcatgatgccagatacataatgaaataatccctccaggaacaacatcatggaacttcagggtagtgtcatccatcaaaactcctgcagggaaaaattttttttcttttaaaaaattgggtattaaagataaactactacattggttaagttaagagattatctgaccttgagtgccacaaagataattttagaaatatcgaatacaaatctcatttgatggtgtcgcgtgggtctgtctgttgttggtaatgcttttcagaaaataaatttggttcagctcagatggaagccgaacaaaatcacaatgccaacgatttataaaattctgtaattataacttgtcctattgtgaaaaggcacatgagtcagtaaagtcattttatgaggcaaactctacaaatagaatgacttaaacctgaagtaaccagtcattagacacacagcacaatgtggttatacaaatcatatagggtaaaccaaaatactcttggataatgtcattacctggctaaagaggtgacaatgacaaaaaaaatgttggatctttcaaattgaagcgtgggagggatttttccaccttggcactgctgacagtttagactgggtaactccttgtggcaggggcccctcctcgttgtctggtgttcacagcttcccggcctctacccactagatgctagcagcacgttcaccaaatcaagacaatcaaacatgcctccaggcccagcacagtggctcacacctgtcatctcagcactttgggaggctgaggtgggcagactttgagcccaggagttcgagaccagcctgggccacatggcaaaaacccgtctctacaaaaaatacaaaaattatctgggcccgatggctcacacctgtggtcccagctactcaggaggctgaggtgggaggatcacctgagcctaggagacagaggttgcagtgagccaagattacaccactgcattccagcctgggcaatagagtgaaaccctgtctccaaaaaaaaaaaaggctccagacattaccaaatgggctctgggggacaaaatctccctagctaagagccgacgtgatgtgaggagctaatgctgacatccaccccaatttggacttggagtaccagagctccttaggcctcatgctttctttatgagcaatgccaccaacatcgagtctcagctccgcccaggtgacacagtctagagtccaactgagtgggattcatgagttttctggtttcatgattcatggctttgtgcttatgtactaggtacttagtgattacttggttcccagaccgagtacctatattctttcatccttaggacagccctccaaggtaggtttgttaactccatctgctgatgagcagactgaggctcacatagcctgtgaacagccaccccagtgctggcaccagacctgcttccctccagggccactgacttctcactcttggctctatgagcaccaatttgctaccagaaactcaggatggtagatgtcaagagggaatagtgatcagcaaatctgttaattagtgtcctatttgtggttcagacacagaggataaccggtaattagtctaagtaagacaacttgactccctacaactttgaaaatattgagtaaagctgtgttttgctgagacgggcaagagtaaaactcccacatgctgaacagcccctgtagagatcggagtacattctctttttatagacaggcagccactgccttggacttagacaaatactaattatcaccagctaaataaattatcacagttgacaacagacgtgtaagggcaaccctggcccatggatttgctcaccccttttagatttgtgaaactcaaggttttcacacatgatctcatttgatctccccccgccccaaattttgaggtgggtaggagaggcctcagaggattatttataggcagtagcccaaatttcttctaataatgagtagcactttctgtctttcttgtttgccacccacagcaaggactacaacagcagagagaggtcgagcttctaacagttgctaagtgcctgttgagtgatagccctgtgacatcagtgttaagtcaccccctctctcgcgctccctcttagctctcttggattaatagccccgcatagctcatcagtgaaaacaaatgaacagaaggggtgccaggcatttgtagttgaggatacataattttcaaattacttgtttgggaactcttactaagtccttcaacaactctcctcacttttaatatgttaaatacagagtaggctcaaaacacatttctttccaaataaagcctcaaaaatgctcgagagcatcttccaaacactcctataggaaaataaatacgtcaggaaaagtgcttaacctattttaaagagagaaaaggaaggtattttggccttcactgtgcattttgagtttcctgcgtcatttctgtccagagggggaaacggctccgagaattccagagctggtttctctgtgttacggattaggaaactgagcccagaagggcagtgtctggcagcaccaagcccgtggaggcaggctgctttcagatctgtctccatcgctccccagcccctgcagtacagctgcagtctctctgcaatatcagctgttcacattctctgtgcagcagcagctcagagattttttctatatcttcattttcttgaagtgtgttgcgttgatttcaaccaggtggggagatgatggagcccagggactttgatcctgttctcatatcctaaatattgtagggaatcgggatagggaaagccacgccttcgggtcagggaaggagactgatggaaggagagatgggctctagggtgcctggcctccactgggtatctgccacatgggacttgtctggagtggggcccttggggtcctaattcagtcacagggaactttcggttctgggttctgattccagctgggctagctttgagctcccgatgtgaacaaggacacagcttggaatttggggttctgatatgtactgggttagttgccactatttggggttcaaacgtagatagcagcatttgctttgagactcgggttcctgtgagggcagtttactctggatttggggttctgattaaagtaaggtttgctgtctgtttggggtcctgatgtgaaaaggtctgttctgggatttggagtcctcgtatgggcaggacttgttttgggatgtggggatctgatgtagccccgagtagtgtagcatttggagggtaggaatcgagcacatctgccctgagatttgggggtcttcatggtgataaaatctgctcaaaatttgggctcctgctatatgcagggtttggtctggaatttggggttctggtataaataaggttggctgaaggatttgggttacatatacaagaaaagtttgctttgagttttggggtactcatggaggcaaggttttgtttgaaccttgacttcctgacatggacatggccagcttcaaccttggagtgctgatgtagacacggtttcgtatctgggggttcagatatgtgtgggtttgacttgagctttggggtcctgctgtggacagagtttgcttcattctttggagcccttatgaagatactttgaggggatttgggttctggtatggtcatggtgagctcggtgactgccttttagatgtgagcagagttagctttgaattttggggtccatatgtgggcagggttcattttgggctctgtcatccttatgtagacagaagtggctaatggattggggttcagatgcacaaatggttagttggaggccgggggtccagaattgggcaattgagggtcatgacgtgggtagagtctgctctgggatttagggttctgttatggccaggcatagcttcagggtttgaggctgaaacatgggcagaagttgcatagagatatatggggtcttgaggcaggcagcgtttgtttcggatcttggcatccttgtgtggacatggttgtggaggattcggggttctaatagtcacataattagtctggcaatttgggatttcagatttagccaggtttgttcttggttttggggtcctaaactggacagagtttgtttcagctttgacctctttgcctggacacagttgttgaaggatctggggttctgaggtagtcatggttagcctggagattaggggttgagtcttgggctggtttgttgattttggggtcctgagatggacagggtttgttttgatttggcatccttgcaagacaaaagtggctggaaaatctggggttctgaggtagtcatgggtagcctggagatttggggttcagttgggcatgtgtgctctggattttggggtcctgaggtggtcaaggtttgttcaagccctggcatcctgggggggatgtggtagctggaggatttggggttctgaagtagtcatggttagcctagagatttggggttcggtgttgggcaattttattctggatttgtgggtcctgaggtcagcagggtttgtttcaggtttggcatgcttgcgtggacatggttggctagaggatttggggttctaatgttctcaagaccagcatggaggaggacttggggtttgctttgagtttggggtactgacatgggcaggcttgccttgggtttgggggttctgctgaggacaggccttgtttcagacaagtcttacatgaacagagttggctttgggacctgggttccttatgaagacatggggagcctgagggtctggcttctggggggtcctggcttggacaggatttgctcagggttggcagatgcagcccgatccaggcaggacctgcttgtggattagggtcctgctgtggacaaggtttgccttgattgggagtccaatttgaacgccgtgtgtttgagattgggaagtccctctgtggccaggaccctaagtggcccttccatctgggtttcagggtggttgggtttcaggggtttgctttgacatctggggtttctcacgtaagcaggcttccctttgggaatccacttcagaagtggacagggtgcccttgcatgtggccagggaaggagtcagggcaggagccaccttcgtcgaggtactggagccgctggaggttgaaggggatgccgaccatcaggtccagctcctctttgagctcccgcacggtcatgtcgccgcggcagtttgccactcggaacatctcccccgtctcctccagccgcacccgcaggacgaagacgtcaggggccaagtcgggcaaggcactcgcggccttcgggtcacagacgagccgctggctccggccgcgggcacaggccaggggctgcgcggggagggcccgcgagtccgccgagcccaccctgggcccgccgcacccctgagccccggcccgcgcaccgctcctgcgtcccgcattggggtgcaggcgagaggcgcccccagttggccccgccgcccgcgctccgcccgcccccgccgccgcccgccgcatcccccaggcgcggccgcgcgtcatccgcggctcgagtgcggtggccacgcgtcatcgccgcccccgccctgacgccccaaggcgggcccatgcgccccccgccccactgtgacgcccaggccccgccaggaccgccccctccagacgcaaggcgaggcccctccctgcctgccgcccgagcctccagggagaccgatgggcgggcggccccccaaggtcccgcagtcctttcccgctccgcgatgaacaaagccgcagtttcacgcggccgcgggagacggttcttaaataatggaacaggacataagtgcttcccagagcaaccgggagatttattgataaatacagagacatcgccgggcagccacgctccgacaacccgcactgggcccccgtcccgagctcaggccacgtccccacctcctcgaagcctccaagctgctgttaatgtcagttcttttcaccaggcaaacggaaggggcattcttgctgctgttaggaaacggttaccacttctccgtgtctgtttaaaataggatctttgcataaattgggataaatcacctggaggaattacacgtaaacaaggctgtaaatcaccattgcatgcatggcctgcagagttgtaaagtgcagattttcgttataaaaacacttctagtatgaatgaaaaaaaaaaaaaaccaccaacatttcataaacatgactccctgcagccgatctggtcccgacatgggggtggatcccagaagcgggagacagccttccacggaaacttgcaaaactgcaccaaaatctatcaattttgaaaatgctcttgaattcttggcggaagaaagatgctgataaacacattaagtggggaaatgctcccttgagaaaggctgggttggctctatgaagacacctttggagtgagctgtgcctgggagaaacccatctgtgcttttcccttcattcaccggagatgaggctgagtgttcaagtaaacaggaagcttacctgtggtggtcaaattacaaacactcaacatggcacccatgaataattagaaaatacaagcgccgaagtgacgggggcgggagctaggagggcgaggggaaacagaacaatcttggaaaaatctcggttgttgcaaaaaaagaataaaatgtatgcttaaaaattatttttacagagaaattacagccataaaaaatatctgtgcattggaaaggcactcatattatagaaaaatgttaacatataaacggaaattgtaaaggttagattatttaccaaagagtctctacaatctctccaagcatgttgtgattcagcatgcaaattatacacatcacaacacaaactgaagctcatttttttccttaacggaaaattaagctctgaatagaatacaagattccagttgaataattctacttgctgctagatcaacagattttaacaaaacaatctcaatttgcgggcaataaaaaaaaattaaaaattgctggttaccaaagcaaaacaatatctccatttactttaggcaagaattaaacacacgacggattgactgattttttttttaatatgtagcttctgatttattaactcactttttgccgacgctgcctaaatgctaccctggggtataatttgcaattctcacataggtaccttattattattttggcgtggtgtatatacgcctatctttcttttaaaagaatcagttaaatggaatttggaggtggaagtcacatcctctatactagaaaattcaatacatagcttcaagaatttcatttaaaaataaagacaagacaaacaagaaaaagaccaaagggcagaatagaaatagcttacaagcccttagcagagctagctcttgaaccccaaatgggctgtttcctccttccttcccttatcctacctttgagaacataaaaatagaaacacgaaaaatgacatgtgcatacatgtaagtaaaatttgttcaaatggttagaaaatcttaaattactgatttaaaaaacctggttaaattctagagcatctttctcttagtctaaatttgaaacgcatgaaatctaagcggtgtgtacttaagtcaatttgaagagtatataatttgacccccaaagtcacaggtgcgtagaacttgtgggcaggttatgatcagaactaggttttcctttttttggttaagattctaaagcattagatataaagtcaatatccatgcatctcagttatcaatttccctcccaagtttaaacatatagcatatccatataaaaatggaaaaacctcagttatccatttccctctcaagttcttaaacatatgacagcatatccatataaaaatgaaaaatctttcagctttatgcctctatcaaaggccaacacatatcttcatggaaacagttcctgtcaggcagggaggagtgagtgcctgaggaaaagttccaagtagtttataacaaaggcacaatattagaaagactgccatcaatcattctttagatttctttatcacatttttcaaaaataaacaaatcgaaccatatttgtagcaactcaaagtgcagcatagatttaaatgatgtatttgttcagctcactgatagggggcaaatactacattaatatattttcttcctgtcaagagttatttacatatgtacagtatttcagttaaaaatataacaccataaactatattttataggaaatcataagggaaggaaatatgcaggtctattaaagacttaagagcttctaataaactactttacttggagagggttggggggacttcagatcatacagtctgccatggagaaaagaacttgctggcagacagcctgatggttcagaggctccagtgcccagttagccacctggtctgcaatctttccacagacttactgatcaggcttgatcaggatggcccagccatccagaaaaagcccccatcaggttcagtcccttcggggtacagatggaaaaggcgtcaatcactgagtgcacagtatgaaaggttccaaaatctcccccagctggtataatacaatcagttccccttcaagttatggtaagccatatgtgccaagcatgaaataatcagattgcaactcatcacggaagtagttaattctgtttttctagtacagcagtgtctatgatattccgccgctttggttctagggctgcaaaaaaggaaacatcttggtcccggtctgactgcaatgctaagatggtctcttcaatgacttcaagatgagggttaccagcatttctaaaatacgctaaagagagaaaccatgagtctgaatcaggtaagccatgaacagtgttcaaaacacactcggttttgttttttgttagccacatgtcaggacaataaatcaaagagtatttctaaaatgttaaagatggactcccaacagttatgcatatttttaaaattatagtaactatcttttttccctgcaatacaaaagaaatggcaatgtgcagagcaggagcaggttgtaggtagggtggggcagggggtgaggtggcaagaaatgtacatgtagggcagagttcaagatattttcctatatgtgtggtgtagaaataaactatccaagaaacacaaagcttttattgagtcctgtccaggtgtaaataatccactagttgggttacaaatcttttctaactgaccacaaaataataccattaaaacataatagcagttaaggcttacgtttgctacctttcataatctttcatgtcataactcaaaatttatcaatttccctcatttctggaaagctatgtaataatttacattttagcatatgtttattaagtatgaagaccaaattacattcatttccttggtcgttttataaataacataaaatgatgcatcaaagttaacataatcatttacataataaaccttacgcgtgctgtcacacaacctgcctcagtttcctagaggaaatctagttgtggcctttaacaactggtggagtctacccgaaatgtgtaagttctgaaaagtgctccacctacccttttccaacagcatctgccttagggccttggctagcagaaccctcacgttgggcacaggatctgatgcgaggctcaggaggctgggaagcaggtgctccatgaactggtccacggggacacactccttgctcaccactgcctgctccaagaaagtcacagccaaagaaatgatgttttccgcagtcttctagaaacatacacttctttaatcccaaagaagtcatttcagaatctgtaggtttgaggcgtgtgtatgaatttttaaatctcaagcactgatttggttagaaacacagttaatattttattataattcactaccaagcagtgggttccaagtaggttaagatctggtgagcttaggagtcagaagtctagattcaaaacctaacttggtcttagtagctatgtgacttctggttaagcggcttagcctttctgagcctcagtttcctcatctgtatgatgacaggtctgttatgcaaaacatctaggacaataccaccacactgcatacagctgaccggtaaggaagggtcaagaacctcatttctgtcattcacagcggccgtggctgtcaagtgacagtcaaatcccaaaccataacccaatgcccagacctctataaacaatccgtaaatgccagtcctgtagtcatacccagcaagtgcatataacttctccagttacacgactttacatgtattctctcacttaattctcaggactagccctggaattcaaaatcagcctagttttacaggttaaaaaaaaactcatttccaatgtggtggtgacacccaaaggtctcataaccaccagtggcagcgggggggtctgcgagcccaagtgtaggttctaactcctgtggcagcagggtggggactgtgagccgaagtgtgggttctaactcctgtggctcttctatgcccgggtaattggtgtcgtggtggatgggtgctgtggcggtggctgctggtgttccctaggtgccaggcgccatgctgggtagctcagctttatcagcccacggaagcccatgacaacactagaaggcaggcacatattcctaggctcctttaagcagtgtacatggcacccaatgtgtagccttttacccctcaccccctcccacccttcccccgcagtcccaagagtccttttgtttatttcagactttctaaatctcagataaagaatttaaaaataaaagcaaaaactatttcctttaagctttctccacaaattgatttggaacattgactcttccttcacaaaagtctgtgccgtctgtgagtttgtgagtctgtgagtttgttgttcactctgccatccactgcccttctcagagtgggctgccaaagcactcctgtaatgtcccactggtccaagagggggcgctggtgagtcctctggtgcccgtggtcatcagggagagaaagggggctttgcggtctggggtcaggtacggtcccaaccacggcttcactgtactatcaacaaagctgggtggtgggttcacagaggttcattacagcaatccctctacctttgtatatgcttgaaaacgtgtgtaatgaaagttaaaatgtttaaaacaatactttagcagaaaaaaaaaaatcatcggcttacacttcctgtgtgatcttgaacaagtgacctaacctctctgggcttcaaatgtttcacctaaaagagctggtctaaaggtaaatgggtatgccatgctcaatacacattacctcttggtttttttttttcttccctgagatggagtctcactctgttgcccaggctgaagtgcagtgatgcaatctcagctcactgcaacctccgcctcccgagttcaagcgattctcctgcctcagcctcccaagtagctgggattaaaggtgcccgccatgacacattactttttattagagaattaaatgtgtgatgtgatacctggcacacaagaggtattcaagaaatggcagccattatcactgccattgctcctaggcaaacataaatcacaccctcatttccaagaggctgagtagagagggcgatctgaggagctggacaggatgatacgaactctacacatttactctaaagaggttaaagtctctgccctaacccactgcccaattcttcatcctgccttccttccaaagccactggctaaggtgaggtgtagtggtggacacagacctgtataggaaaggagtggactgtgggcctggcccttatcttactggatggaaatgtgggagagcagaggcttgttcactttgtctttagcatctagaatctgtctggaccatcgtaggtactcaatcaatagctatgtggcaaatgagtatgccagtggggtaaccctgggcaagtcccttcaccacactgggttggtcccaatgtcctgtgagataacagggctaggtgaactaattcctcagttcctggctagtgctccaggctgagattctctgtctggtgaacttgatttcatcacgtggcagatgttacccagggtagatccctcccggggtcttgctaacctgacaaatgaaagcgaaagcttgccttccaacccacttagaacagtgccggaaccttatgatgagctcattgatgaaatttaaccccaatgcactttcactgttggaatagaacttctgcagaattgccacgacctgtgaaaaacatcaaaagagcacatttaaaatgctgccatctatttgaattacgaatactactctacacggaaactagacatttttatgcatccttccacctttaaaatgaatttataggcgcaggagaaagtaatttttgtcacggtcatcattagaacacagagaaaaaagatgtttaaatataggcaatacacacacacacataaaacccttcataaaaatgaaacttcaaaggagactgacattagaaaaatacattcttaatcttaaggttccaaattttagagcatgtccccttgcttaataactaaatcattacctttcagaacatgtcatttttataaaattttaataccatcagagtatcttaaaatcaatattgtcaaatgtgattttttttcatcagtattcagctggtgtaaagcccacataaaaaaataggatcagcttttctacagcagagtctttgctcactaaatatttttctacaaaaccaagctgtaaatcaacctgtattttaaaaacactaacctatggcttaaagagtttcatatataaaaggattactccacaattgccgtcactgaaacatataacaaaaaaagctatcctacaaattgataaaactataatatagttcctaatttcaaattttaaaagctagtttcataggttagctgacaaagtaagcccagaaaaattaaaagagttaaaatggaagatacatcaacattcctatttgtaaaaatcacagagcaaatgccctgattccttactagtttgaaggagatccaccgaacttcagaaacttgatctgcacacaactttaaggcaatgtgcattaggtaatcataaacatcattgggactatagagttccagaatcagtatcagctgtctgaaattaaaaggaaaacaacaacaacaaaaacaacaacaaaaaaaacattatttttgggcaaaaaaacaaaattattgatttctttttactgttatttcatcttacagataaaaatagccaggctgggaaatgaacagcaaaagacccagcaagatttcggtcttcagtaaaatgccaacagcagaaagctgagcaaaatgaccatgcaaaaaaaatgtgaacaaaattttaattcttcatctcacacacatacaaatcaaacaaaaaggaaataaactctgtaaaatagaggctgagaaatttatgaatacagatttaatatttcaattttaggttatcagttgaaaagcacataaaactttaaaaatcagataacataaaaatagccagaatgttgaagttcacaaaggtcaacagatcaagcgaacactctgagattgcacgaccgccccggcgtttctccgactgcaaaccgaaccggatgctcctgctcgcggctcttggcagcacgaggtggtttcactgcagcgaggtccgcttggagagaactgggagcgcgtgctccttactccgaaagacaaaagcatgcaggagacggctggctgcgaaaacccactaccaaagctttcactactttctaaatggggatggggagaagggcatgaaaataaatgacattgctttcacccaggcaacgaaaggaaatgaaaaagagatggggaggaagttagaaccagaagcccggagtgctggtgaatactttcatatcaaaaagcaccgttttcaaaaacatgataccaatatcatgggcaccggagcacagaattcatatcagtcgctgtggcttcaataagccgggagatgggagatagggcgcgtagggggctagataacgtggtcgggcactggggccgcgcaaccacccggggaagccccgccgggcaccgagcgcgcctacttcccgtgcgccgccgctagaggtcgcactgctttcatggaaaacgtgggcctgtttttctcgactcagaacaggatgctgggaacatggtaaaatgactgaaacctcaatctctcaaattaagcagaatgattaaagaccacagcaaagagaaaggctttcggtttgcccctggcatcagccaaatcatatcctgaatagctgcaaaagcctgatgaatttattcagggaagacaattatttgagagatttctagttgtggatgagaaaaatgaaaactaaagacaccgaaatgaaaacaaggtaaaaactaaaacccaaacaacaactgccacaaacaaattccctccacaccgtgaaaggcacattatataccttaggaaggggagttatttaaactgatgcttccaccctttcatcatcactaaagcctggaacattccttttgccagctcaagacagaattaaataactccttcaggcacaaaatgatgtgcagataggagccaccttggggaacctttttgtttcataatcatctcatctgggttagaccccttcctgtctcccacagtagctaaagggcattaagcatgctgtaccctacggagaggaccacactcagaatgttcaggaaagctctggtaaaaactgctccgattaataggaaaacactgaagagtgggtgattcatcttttatttggttcaaataaattgccttctagaacagcagaacactctaattcgaaagtgactcaagccctgtcttcatctgaaaatgaatgtctccccggagactgtggtatttgtaactcagggtttttggaattctgtttataccttaataaaaacataatctctttatctaaaagaacactattgctgctgctttagaaatcaattatatggtaagaaaattaagatttattccatctagtttgctttctcatatccccaaatatgtttttacttactctgctagttcatatcgaaacctccaattcctgctgttatcagtcactacaaattcttgaagctgataaagatagtctctcctcttgtcttcatgaagcaactattttttaaaaatgtatatataaacaaacatgtataatccttcaaaatgaccccaaatgcccccttttattccacttccaattatacatttgtcactggcaagaacttttgcatttcccctacacctcgtcatctatcacgcagcgtggctgcgaatgaacactgctgtacactgacatcaaatgcatccctgaacacctccaaccttttcccctggctaggacatgtgcttattatgtatttctgaatgcccctgaggtcttcctgctttagtaatttcctatctaaaaacaaaaaaacagacaaacaaaaacccagtctgtgtgtgtttggaagacagtgtgccactgccgcttcccagggagcgaggctgctcggcaccaggagaggagagactcagctggagcagcgcacaccagagtccgtgaagggcagctcttggtcatgtggatgagagtaattagtttctctaggtcatttttaaactcttattttttatattcatcgttcgtttgggggggagggggggaagccagaagggaagcagcagcgacttgcagaaaaagtgcttcatgcagaacagaggttggacttcagcccaggctcttcccctgggtgacttctgggcaagtcaggtcactacctgggggccttgatttcttcttttgcaaagagtgtgctaggctttgtgtctaccatcttccacagaattaaaactctaatggacaggaaaatgaggagaaaaaagtttaaaatatttacccatcactgaaagaacatccactttaagattatggatggtacatttcagctaaagaaagctaaaaactgcattgtttttttcactgacaccatagacatccagggcttcacaaatttgattcggagagaggaggcttgttttttgcttttaacccttcttcctacctttagaaaatcatacaggtgtctaagaactcctattcgcacttcatccagatcctttaaaaatccattgaagataggcaccaggtcagctgctgttaactgatccccaagaatcacagccagctcgtgaatggagaaggctagggctcgccgtaccttccactaggggtgcatagcagacacacgaatcacgacaagcaagtgcaattcaacctcttccgtatcttacatggcatttttggagcaaaatgaatactgccaggtgttggccacttaaagctttatttcatcagagaccagtaaacatgccaatttgcatccacataaaattcaggccaataagccttgctgcagcttcccttttctccctaatgaatgacccaccctctttctgcacgtgcctctggaaaggcttttacctgtacatcagaagccagtgtttcatatgtatctttcaggcagtgccaattttgcctgcccagggtcagtgccacccctgggaggctgtaggcacagtgtttggctatgtcagtatcgacagtctgggctcgagctgggtcagtcatggacacatactgatctagcagcggctgaggtattacatcctgggaaatgagagagaaaggaggccatcgtgaatgcaggaaaatactcatgaaaaacaaggagtttggagtttagaggtgaaaacaataaagcagaaatgtgagaggaacatgaggccttcctaaagccaaagggcttcagattgccaactctgttttctccagagagtgggttttcaattttgcttgaagtgaaagcaacacccaaaactcatcttcttaagattggcacaatatttgatatcatagaggacagtctagacagcaatgtctgcttaggctggtacatccagctcttgagaatggagactgccttctcttttcttacaactgccccaagaacctagcacctgagaccttatactctgataatcacgtctatgtttgactgtgcttgactgagatagaactcaatcaaatcagtgttagatgtcttatttttttctcatattagtttgctttattgaaaacactattatagattgttcagaagcttaaacactaccttacaattaattttttacaattagcaacacgaaatatgaattaaaatatgtaatcaatattgatagaagaaaaaatatttggttccaattcttaaagttaactttaagaaaatacacagttttgagttgcctccccgcccccccgcccccgaaagaaacgaacctgtaatttagatttattctcttcaagtggggtgggatcctgcctctggtcagtctccagatggtcactggttccatttctgggtccacctggatcctacagagttgattggacatgttaccaatttgctccaaaggaagcagctgtcctgtcacttccccttcaaagagtcctttttcaatgccagaaattacttctgtaagccaaggcaaaagctttccttgaagtcaatggtatctttccagatgttaaaaattacatttgcacagttacatatgatactgtataaaccagttcttttaagtgcaaaggaaaattgatttcatacattttaatttcaagactgctggaggtccttacagaaatacaaaggctaaagtgaaagcactgaggagcaaccctgtgagtttgcatccactattccttatgccctagggactccctggtatggctaaccaacacctttaagtaatattcacatgtttaaggcacagactactccagaagggtgaggtttgcaagaagtggtagagccagcacctccagcatttcttggtaatcagggattgcagcaatggtgggtccctgaaagaggatgggggctggggaacccaatgaatctgagagaaaagatgtggctgatacaggagtatttaatcagaaaattgtcctagattttcacaggtacaaacactcctgatgttcgctgataaacctttacattaggtaaacaattaaaatgaacaagaacattcaatggtgacattttggtctctgatcgttgattaacattaactgagatggacctgaccttctccttcaaccataacatggatttccaagttgcacttgaaatgtcatactgtctaccagcttaatggattctgacaaatcagctcaatgtatgatccaggaaagtcgattaacacaccgatagatgcttcgtttgctctgaggcgcgccaccagaaccttcaattcccaaggttttcactgatatgtactatttattttaacagaggacatgataaaacagaaatattttggtataaaaacctaagacctcaatttcttgtggtcttattattaataaattcacatatagtaacaagatgtgtcattagaatcactattatccctttagaaattaattttattccaaagtcttcagtgcaagcatatgtgcagcacttaatccaggagccaaatcaaggcttaagcaaatcaccacaagtcatggcacctccagaaggtattgtgagttccccaaaccccagtgggacaccatgctggctggctacctgtgcacccaccactcagcatccagcagccttctttctagcaggatcccgactcagggggctcccatgtttctgcccagttcaccatgctcaacccatgaatgcacaccgtgactgtggccaggaagagggaggcagaaggagagggcagggaggtggtttcccgcctggggtgtccttgttcttcaaaagagacaagtgggaagacacaggccccgccttccactgggcatttcatgctgacaaaagccaccacagcagaggggaagggtggacagatcagcaccaaaggtatggagtctagcagcccagaagctgcccaaccacagcacttcttcctcttgtcttgtgcaagagaacattttcctcatggttcttggagttttttatttcctctcccttcttttgcgacaggaagcatcctaattaatcccactaggatcttggagtcaagccgcaaattcaagggctctgccctcccacaccataaaacaggctccattacacaaacccttttaaagctgcaactcaaaagccccagcctggaggaatctgttcttttttttttttttcacctctatgataaagaagtccaaatactatcacatccccaccaaggtaaatgtggtcacacccttctacttaacacttgcaacttttgcactctaggtaacaaggttgacaataatgagctttcttgctaatttttttagcaacaaaccagcagaagaggatatcaccccatttcttattaatcacagataaccaactcctacacattttatgtttgagttctaaaatgttttattttgctttattagagcaggcctaaggggtaagggaggtgttaatcactgaaatcaagttctaaactgtatgaatagagaaacaactggtatttaggccctggagaccatgagattgaagagattatccatcatggcacatgataatgacacggtgctatcccaatgactgtatgaccacagactcctccctcattttaatcctccattctgcccccctacctgtggaagaccccaacttaaagtggtccaagtggaagcttagtagaaactaggacagctcaagaacctccagctacaaggggttgacccaagctcctggagaaacctgaagaaataaatcatgggcccctcttcactccagctttggggccgtggtctcacaaggggctggttccacccacaggaggaagggggtcactggtgctttttcaaaagaaagagaaacagcatgccaggaccagcactggagcatccacgtatgccagagcgcctaccaaatgggcggctggtgtgacagctgctctgggaggcctcgtccacttgaaattccaggaactgcctgaattcaccctccactattattaaaagatgttgatgtctgttagcagtgacacagagcatttacatggttaacctccccaaagaagaagttcttgtcatctctggagaagagggaaggtactttctggtgcccacccgtcttcgtgggagcgcgtcggcactatcaatcacctgattgattggttgtctagttatccaaaacatgaccttaagaataaaatgaaatttgccatttatcatctctgctgggatatattaataagagaaaatgctgctttgtgatttctgtcacatcctcggtggctgagggatacggcaaatacttactgggctttgtaatatcctggccacaaagagctcatcctgagatgatgaggccgccagagcgatctgattgtcagaggcagagctgggatgtgaaatggacacttcctttaggcctgctgttggcttgctctcagcttcattcacgcagtcgagctgtgcagctctcagtgcagcggataatacctgaacttgagctggaggaagagaagtttcaagaaatttaacaactttatttggtttgtgggggtttacttcagagaagtcttcaaaacaacatagtctgcactaagctacatggtgtgggtgtactacactgacacgtatctgttctgaagtgacaatgctctggagtctcaagctctcggcaaggtggtgatatttccggccactaacaattaactacttcaactaaatgccagccatgcacagaacatcaaacctgaacttgaaaagtctcaattcggaaaaacccaagtgactccaccatgtttcacagaaagacagcatggtatcactgaacaaggatgactgggaggtccaacaactcagtgaagggtatcctgctcccccatttataaagcaggatggctacctgctcacatacacatacatacatgtgcacacacacacccatgcatgaatacatccatttacacacagatgagtaatgctctcactcaccaagccccaaaggctgcccattctttctgtccagagtatgacagtttgagactatctaaacagtaaagataacatatttcacatacctttctgtaaaaataaacgaatgttttagtatcctcaacctcccaaaagacacacacacacacacacacacacacacacatattacttcctgcatcctgcttctattaattaaatttcgtggactccaacattcatcaaaacactgagagcttgtagctggctctgcgctgtgcccaggacaggtcccaccgctccagtgctacacaccaggcccttcccaatggcctgagtgacatctcctgcctgccgtggccagttcacaaataaaatgcatcacttatttctagatcttcggggatcatagatccctttgagctctgaagaaagctatgggccttgtcttacaaagaaattaagtatgcacaaacatgcaagattttacaaataatgatttcagggaactgaaagaaccttctgaaactcatcccctgacttctctgaatggtgggttctcagccaatctctaaagcccaggccaaatgtcacctgctatgtaaggtctctcccagacatttcctctacacatcgcatcccctccgttccgagccctcgccatgccccacagggtggctgcctgcacaatccccttaaccatatcacaagggcctcaggggccacagtcatcactgcccagcccccagtccaggtcttacactggggattaaggcagctcagtaatgtgttttccaaaaacagacctttgtctctagctattagaagtgatatgttacgtgtgcccattccttcagcaaacattgatttaatttccttcataaatttaaggataaagaataatcacagggctaactgaattttcatagttcccttcccgaaagcttcacaaatctctgcccagcaacagcagcaagtgatgtttttttccaatttctccaatgcaaggaagaatacaaatatagcactgtgcagagaaggaagatcatgataatgggatatggattgcaaggtccagatccctgatcagatgctcagtgggagcacgagtcataaaatgaaaaataccccaaagcagtagttgtgcttttccttcctgtacaaagacaagaaccttaaagtttagctaagggctgcgttaataggctccaaaaggaggccacccttggctgttcgtaactagaaagggcattctatgtgggagatgatgtaagagtgtgtctaaggagctaataaaatttcccctgccacagacatgcccacaaactatccactttcctatcagaactgacttcagactctgtgcacgtccatctgcaaaatcagaaagcaaaatcattgcataggtacctgcacagaggtatttctgacttttcgagctgtactgagactgaacaagtctctcctctcaatgggtatacagtgtaaatgaatacaggtccacacgcacatgcgtcagtacacatgcctggggaagaaggaagtggcgaaatgcaacacacgacacagaaacatcccatcttctctttaatgacaatgaacaacatttaccttgaacatctggatcattcatcagatgctcctgcaagctaccaaggactttctgaatctcactccgggccacacagctgttgtgcacaaccccaggtctgctgcagtcgtcctcctgaggcccagcctcactcagaagcagctctaagtccttgcttatgtcagggagaggagttcaccaataaagaaaatgactgaacacatcctcagtgttccctgggcaggcccaggaatctgatccagggtagctgctgatggggaggtcattcatgtcagaaagctttgagcaggcgctggtctctggggaaaccctggtccactcagctccagccgacacacagctttccacagggctttccgctgggccgtcagaggagctactgctgtgtgggcaatcactggttttcgctgaggtcccttccacaggtagctctggctcgctccgcacaggctttgctgaacgagttaaactgagggaagcaaacttttaatactgtgtaacagactgaaagccacagggaaaaacatgagaaccacatcctcacccagtcctctacttcctagctgaccactggcccctctttgtgtctcctggtgtcagctgactaaaatctcacgagaggataagaggtttgtcaacccccactgccccgccgggagtatgatgggcactgaaaacaccacttgaaagttcagccgttctctccactatactccagggctgagccggcctggacttccgctggagcaccttcggtacatttcatccatttcctgctcatgagtacctccaccagagggcaggcattagaaaacaaaaggcgctgaaactggtaagaggtggctatttgttaaccactttgaggtcttgaggaagacactgcccatgggcctgccatacagcaggagctcaatgaactctgatggaagtgggatggagggaggatgggccaacctcggaaggatttgtattctgtgaggcatcagttacccactctcacatgcctgcacgctagcgacaatggagagacatttacaaacgacctcaaataggatggctggtgtatacgcatcagcctcagaggaaagacatgacaaagccaagatccagcgccatattagcaaacactggagggtctaccgctgttggtcaggagtgtcgcctttatgtacatgtaacccaacctccaaaaaagtacatttgggagacttcacatttttccctaagtaaattacccagagaacttcattcatcaaaaagtaagagaaaatgttctttataggttatttaatcactaatctcaatgaatattttatctaaatttaggagacatagtagcttcattatttataacccagtagtcatgtttcaaaatcattattgcaattactttttgcttctttacataattaaagctctaatattccatcttgcccagaaggtcactactaaaactcgagacaagataattgctgaaattttaggtgggtgcttaaggtacatcgagggtcctggtggtgaccctagccagagcatacctggcaggggaagtgttaccaccactgctgggagcaggggagccagaggcaaaaccagagtccaaatcctgggtgagtggccagatgctcagggcgccatcctctcgaagataaaggccagccctggaggggtttgcaaaggtggaagtgaaggggccgagggactggaaggcagcctggtgcacctggaaccagaaagaacagtgcagtgaatgaacgcagcatcggccagcggcggtggccaggactgagcccaggctgaaacagatagttggacaccacacaagctactctccaccacattacatctatggagatttattgctttctaaatcattccctaaattccaaatactattattcaacagaaagtaaggaaaaatttagccccattatactgttttcattcttccagaatattaattttatatgaataatacattttatatcaagtatttgaacaggccttattaatcattacagacatgtttatgatagcaacagaaaaggtaacagttcagttacatagttttttctttctcaattatgattttcatgatattcgttcactataaatggtacggtgtacctcaccttcttaactcaccccaagcttttgagattttagtttccctgagacctcacaaggtctaaatgtgattatggcaatcagtaactgaagggacaaaatacaaagttacaagcccagaagtgaatcccagcctggaagccagacgtagctgttcagttggtcaacagaggctggtgtctggacagggctgctggcactcacccatcggcaggggtcgctgacaagtctgatgaagagcgggaagagctgggttctgcggaccccaggggaggagctgtgcgacacagccgtgaagcattctgcacaggctttccgcatgccccaaacagcatcagagcagagctcaaagaactttgggatctgccaaaacaaacaaaagagtgctactccaatcggagactctgaggaagagcagaacctgttttttttatttatttatttatttatttatttatttatttatttatttatttatttttgtgagacagagtctcactctgttgcccaggctggagtgcagtggcgcgatctcggctcactgaaacctccgcctcccaggttcaagcgattcctgtgccttagcctcccgagtagctgggattacaggcatgtgccaccacatccggctaatttttttgtacgtttagtagagatggagtttctccacattggccaggctagtctcaaacttctggcctcaagtgaccagcccaccttggcctcccaaagtgctggaacctattttaatgaagcagtgaaggcatatgcagaaattaatgacaaggaaaaggaaaatacatactggtctaaaaggaatcatttgaaacaaacagatattatgagaagtggaagaaataaacatttcttttacctcctaattttagtaaatgacttggttacctttaacagataatagagaaaatcccaaaaagggcagaatgaccgatatttgttaggtaaattgtagagaagattgtgaaagactctgaaacagtagatgtcccaactaactcacccacccaggtatcactgtctttgcctagctattttacaactctgaagtgatagaaggtaggttgctaaaacctgatagtaatgcaaataattcctgccaacagaaatgcaaattgtgtccagtgaaatgtaatcaattatcaccctggatattgaccagttttgaattcatttgtaagttcacttcgatattccttgctctgactataaatgagtactttgagttctccattaaactggctgtaatatcttactggttttcctcactaataaatgagttaaataaaatctttgaaatacgttcatttcatatctctataaaggtcatgattacatccccttttaaagtgtatcctttaaaagggctttgtttttaatatcctaatgtaaaatagcctaaaatgcttcgcaaatgggaatatgatataatcatgccaatatctacctacaaatgattagcatgttactcactgccattcttcattcagatatattaagtagaagataacattcactgtagatgggcgtggtgactcacgcctgtaatcccagcactctgggaggccgaggcgggtggatcatgaggtcaggagtttgagaccagcctggccaacatggtgaaaccctgtctctactaaaaatacaaaaattagccaggcacggtggtgcatgcctgtaatcccagctactcaggagactaaggcaggatccagccttagcttgaatccaggaggcagaggttgcagtgagccgagatcacaccactgcactctagcctgggtgacagagcaagactctgtctcacaaaaaaaaaaaaaaaaaaaaaaaaaaaaaaaaaaaaaaaaaaaaaaaaaaaaattcactatatattcaaagcaacagcccattaaaaattattcttgggttagaactgtgctgacatggcttatactttaaacaaaataaaatgagcttctgaacttaaatttaaaaatcaatttaaagattaaactttttgaggtcaaaatctcacccatacaaggagtatattctgtcaaataaaactgacaaatgcttatggagcaaggttctctaggggccgggcactgacggggtagacactggggaaacaaggatgaacacaacacggtccctgccctcaagaagctcctcagctcctctgaacaaatgctaccaggaagctgagaagggagaagctgattctctctggcactgcaggtaggtcagcctagacaaggaaagaacttcacagaggcaattcaagctgggttggaagtgtgaggagggtcccaccaggcagggaagatgctcttagtgagcacaggcccagaggtacgaaagagcaagaagtctcaaggatgctgaagtcacctggctgcttagggaagtggatctctactctgctatgcatcagaatcatgtgggactttatcaaaaatgcagatgcctgggcccccccaggcttcagatatatggccagaggtgagacccaccgaggccagggtagtgttcagaactgagaaaggggactggaggtgaggcagaaaaggcatctacgaagggacctggaaggcccagaaggctctagattttaacctgtaaaccaagaaaaaaatcccaatggttttgaggcccaggagtgaggtggtagagtggtgttctagaaagagcagcagagagagaagagagagagcaacttggacagtgagaagaaggcagggaaaagtgacttgtaaggaggagacagccaagcccaccggaaaaaagatgggggttgcttccagcccattccacagaccagctacctaatgcttaggaaaatgttagcttcagaagttatgaaatttgaaattaacaaatgcaaaattgagctgccattcataaatacaaaacttaagtgattttgaaagtgcattaagaagcaaatcaacaattacaattggccaaaatgtcacataccaaaaatttctcagtggcttcttgtccaacagcatgacaaatatcaccaaaatttgcagcacaaaccttaaaaaggcaaaaggcatatccattattcttatctttctttttgtcttaacaaattgtaaaaactaacaagcaggaactttgagagcaattaccccgctagtcaggcagctaacgagcctttcccaagcccatcgcccatacagcacaacgccagatgcctccattgcatcaaaaacagaagatttacaataaggtgccaaattctaagattttctggctcctaattgatcttgatacagaatgcatgttagcgataaggcaaaagaggccccttaacattccctgcatggtaaaggagacctgctgttctgcctgtgtatcatgaacagagaccagaggggtgatggccagttacacagcaaggtgcaaggtgaggctgtttagggaaggatggtaacgaacttcaaaaggaagaatttgacaaccaagtgacaagtgactaaaagggaatttggggttggaaggtatagcaaagataagaaggttctggatcaaatcaccacagataatcaaagaccttgcaagcctgggcatctaaccataaaccagcaaggtcccctaactctcaccctgtgcctgagggcaacaggtctagtcatacagactctttatctccaggtctctacgcatttcttaactgcagtaaaaactggcaacgctgttcagatattttccttacatagttcacactggacacatttttcccccagactatgtctactgaagaagtccaaaacctttagaaaaatcaattttgaactttttttaactttaagagttttagaattcttacattcctaccttccgaacttgaaagagcttcctgtcaccacacagttcacagaatcgggggagtagcaggcgttcaacggtactcttactcagcattgaagccattttgcagattatctataaatttttttaaaaaatcgaatcatttaaaatgtcaaagcatgtaagtcacatgtagcactaaagatatattccaaaagccaatattcaaaatattcccaacatacctaagaaggaaaaataaaaaacaccttcttttgagttttgtcaagttataagatcaacagaaggcccaacatttctccagtttgactcaggtaactgtttgtcagaagctcaagagttacaatctgccaggtccccaccttgtgcccaatacacaaacaaacaaaaatgtatgtgcattggctcattttaccttcccaagaatcctatgacatgggcattatttatcctcatgtttccggatggggaaatgctgcaagaggttaaatagaatgactaaacacaaacagtggggaggtgagtcatccagtgacagcaagacatggtaagcactggaagatgatcacattctggagaaactaaagactagacccttacaagaaaaaaaaaaaaaaaaaaaaaaagattaaattttgcatttatgctgctttttgcctgagggtacttcccgttctacatggctatacagggtagctagacctcaagcaaaagcaacaggtagaagtcctagccagagcaatcagacaagagaaagaaaacaaggcatcccaaccagaaaaaaggaactatctgtgtttgctgatgatatgatctcatacctagaaaaccctaaagactcctccaaaagactcctagatttgataaatgaattcagtaaagtcttgggttataaaaccaatgtatacaaattagtagcactgctttatacgaacaatgagcaagatgagaatcaaatcaagaactcaatagctacaaaaaataaaaataaaatacttaaccaaggaggtaaaagatctctacaaacagaactacaaaaccctgcccaaagaaatcacagatgacacaaacaaatgtaaatacatcccatgttcatggattagaagaatcaatatcataaaaatgaccacattgcccaaagtaatctacagatttaatgcaattcttatcaaaatatcaattcattattcacagaattaggaaaaaaaatcctaaaattcatatagaattaaaaaagtcagaatagccacagcaacaccaagctaaaagaacaaatctggaggcatcacattacccaacttcaaattatagtacaaggctatagtaaccaaaacaccacggtaatagtataaaagcaaaccactgcaacagaatagagaacccagaaataaagccaaatacttacaaccaactgatctttcacaatgcatacaaaacatacactggagaaaggatattctattcaataaatggtgctgggaaaactggctagctacatggagaagaacgaaactggatccttatctctccctttatacaaaaatctactcaagattttaaatctaagacctgaaaccataaacattatagaagaaaatctaggaaaaactctttctggacactggtgtaggcaaagaatttatgactaagaccccaaaagcaaatttaacaaaaaccaatataaataaatgcgatctaattaaactaaaaagcttctgcacagcaaaagaaatagtcatcaaagagacaactcacagaatgggagaaaatatttgcgaaccatgcatccaacaaagaactaatatccagaatctacaaggaactcaaacaaatcaaagaaaaaaacaaataatcccactgaaaagtgggccaatgatatgaataggacatttctcaaaagaagatatacaaatggccaagaagcatataaaaaaaattcaacatcactaattatcagacaaatgcaagctaaaaccacattgacataccacgttaccctagccagaatggccattattaaaaagtcaaaaaacatagatgttggcatgaatgtggtgaaaagggaatgcttatatactgctggtggggatataaattagtacaacttctatggaaaacattacggagaattctcaaagaactaaaagtaggtctaccattcgatccagcaatcccactactgggtatctacccaaagggaaggaaatcactgtatcaaaaagacacctgtatgcatatgtttattgtaacacaattcacaattgcaaagatatggaatcaatctaagtgcccatcaaccgatgagaagacaaagaaaatgtggtagtctgggtagtgagacctgtctctacaaaaactaaacaaaattagctgggtgtagtggtacacgcctgtagtcccagctacctgggagactgaggtgggaggatcacttgagccgaggaggttgaggctgcagtaacccaaggttgcaccactgcactccagcctgggcaacagagcaagatgctatctcaaaaaaaggaaaaaaaaaaaaaaaatatatatatatatatatatattttaatgtggtatatatatatataccatggaatactactcagccataaaaaagaacaaaataatgtcttttgcagtaacttagatggaactgcaggacattattctaagtgaagtaactcaggaatggaaaaccaaatgccccatgttctcacttataaatggaagctaagctatgggtatgcaaaggcaaatacagtcatataatggaaactgaagactcagaaggggagagggtcagaatggggtgatgaatgaaaaaccacctattggtgttcagtgtacactactcaagtgatgcgtaccctaatatcctagacttcaccactatacaattcatccatgttgccaaaaaccacttgtatccctaaagctagtgaaataaatacatatatacatacataaattttttaaagctacagttttactgtgaaggaaggagggagccaaagaaaggaaagctccaaaatctgtggttaaatcttaccctaatccttagctgatctctgaactgggcatgcacaggggagatggtgaggttcatagagaaacagtaacttaaggatgaaagaagtgagctgtttcagctgctgcctactacaggaaaaacagaatctgaactgctttctagaacaaagtcaatatctctagaggtaaacaacaaaatccagagtttctacaatgtttcaacaaaatacaatagaaaatgaaaaatctatagacatgagaagaaataagaaaatgtgacccacagtcaagaaaaatatcagtcagcagaaaaaacacccacagaaaatccagatattagaattagaagactttaaaaggaatttaaagcagctattacaaatatgctcaagtacaaagaggaaaacagggccacaatgaatgaacagattaggaatcttatcaaagaaatggaaactataaaaaagaaccaagacttctggtaatagcaaagtctaagttagactaaccctcctgaagctaaaaattatagaatcttgacaaaacataaaaaaaacaccatttgaaagcagcggaaagcaaccaaaaggcagaaactggaagaggggctactcttaaaagatacactgcaacaggagagatttgcaagcaaggtccaaaatctgtgcataaaatgtgcttaaatctttggctaactgctaaactacatatatgtgagggggatcccagaggacccagaaaaaaagcagcgtcagaaattaaacaaactcagcagagatttcagcttctgctcacaaggcagataatttggagctggagattaatcaaggtaactgcctcctaggacaaaaatcattttagaaaaatataacagaatccagggactctgcaatgtatcatttataatgtccagtgtccaatcaaaaatcactactcatgcattaataagaaaaaagtgatccataatataagtagtcaatgaaaaccaacatcaagatgatccaaatgttgcatgggccggacaaggactttaaaggagctgttataaatatactcaagaattacaaggaaaaaatgcataaagaatagacagggactttctatatgatagagatatagaaactgtaaaggtctataaaagatcaaaatggaaattctagagcaaaatagtacaataactgaaattaaaaatttgctggctaggcctaacagcagattggagagaagtaaaaaaaaagaatcaatgactttttaaattaataaaaattatcaaatctaaacatcagagagaaaaaatgattaaagaaaagtgaacaatgcctcaaagacctgtaggacaacatcaagggtcccaactttgtgttatctaagtcacaaactgaaaggagaaaaagaatacagaaaaaggtatttaaaacaacaatagcccaaacttcccaaattatttgaaaggcttaacacacaaatccaagaagttcaatggagacaaaacagtatactaactatgctaaatccaaaggtaaagagaaaaatctcatgagcagccagagaaaaagggatattttatatatacgagtacaatataaatgatagatgacttctcatgagaaacaaaggaggccagaagacaacagaatggcatctttaaaatgctaaaagaaacaaaaaaacttttcaactcacaattctacatccacaaaactatcattcaaaaataaatgcaaaatagacattttcagataaacaaaaattaataaatttcatcatcagccaacctgaactacaaaaggtactaaaggaagttcttctgcattaagggaaaggataccagatgataactcatatccaggaaaggaaagaatgacaaccaccaaaaatggcaaaaacgggcatataaaaggctgtatttttttcttttttactaatctcttcaaaagatgtaactctttaaatcaaaaattaaaatactgtaccatatggtttaaatatatgtccccaccaaatctcaagttgaattgtaatccccaatattagaggtggggcctggtgggaggtatttgggtcatgggggtggatcccttattgcttggtgttgtcctcacaatagtgagttcttgcatatctggttgttgtaaagtgtggcacctccctccccactacttcctctcttgctcctgttttcatcatgtgacgtgcctgctcccactttgccttccgccatgagtaaaagcttcctgagacctcctcagaagcagatgctggcactatgtttcctgtgtagtctgcagaaccatgattcaattaaacctcttttcttataaattacccagtctcagttattcctgcatagcgatgcaagaatggcctaacacagtgtattcgcaggctcataatgtaatatacatgaaagcaacagcacaaaggatgaaagcaagtgaatggaaccatgctgttgcaaaaggtgatatattttttgaaaatcctcaatagaggaattaaaatgcaatgctaaaaaacattcattagcccaaaagaaaacagaaaagaattaacaaaaaaacagatgagacaaatgaaaacagacagagaaatggcagtaataaaaccaaacatatcaataattacattaaatataaatgaactaaacacactaattaaggagcagaaactatcagactggatataaaagcaggatccaactagatgctaacaaaagcacaaacactttaaatgtaaagacatgtaagttgagagtaaaaaaataaacaaatatactataataagtataaaaatcctagagtggttatattactatcataattgattataaaatatggattactgtcaaagacatttcttaatgatgaaagggttaatatatcacatagacattaacattaaatgtgtagctttaaatgcttaaaatggaaaagaatgcaggcttaaaaatactgtttcctctttaaaaagctaaaaaaaggacaagcaaacaactcaagaaaggagaagggtggaaataataaacagtagaaatcaatgaaaaagaaataagtgaaaaaaaccaacaaagccaaaaattggcttgaaaacataaataaatttgataagcccctagcaagactgatcaagagagaaaaaaacacaaattaccaagatcataattgaaaggggataacaccacagatcttacagacattaaaaagataatagaagaatatcatgaacaagtctaacccaataaatctgacaacttacatgaaattaataaattccctgaaatgtacaacttacccagtgacacagacgaagaaatctgaacagcactgtatctgaattaaatctgttatgaagaaccatctcacaaagaaaactctaggaccagaggttttactggagaattctaacaaatgttttaggaaaaaaataactccaatcttaaataaaacctttcagaaaatagaaaaggagggaatacttcccaactcatttttttaagccagaataattctgattctaaaatctgacagagacataataggaaaagaaaattgttctcttgaatatagatatgaaaatcctcaacaaaatggtggcaaattatggagaaggcagcacagtagaatgtcaaccagaattgtcaatagacagcaacgctagcgggtgaaggtctgacggagaagagcatacttaaatacaaggtaattctcattacttccagagggaaaaaagagcacactggagaaacctggcagataccacatctatctattaggtcatcaaagttaacatcaccaatattaggacaagctgaagtcttgtgcctcctgccatgacacactgggaatacatcactcctgtgatactcctgccagaaagacagaatctgaatccaatcacaaggaaacatcaggcaaagccaaacagggagacactctgcaaaaaaaatgtggccagtactcttccaatacttaagtgtcacaaaattcaaagacagactcaggaactgttccagattaatggaaaccaaagagataggacagctcattgcagcaagtaaccctggactgggtcttaggcaaatggcgatgtttgcatatgaactgtggctatgacgttagcactgtatcggtgttaaatttcctattttgatcattgtactatggttatataagagagtttccttccttttaggatatatacattgaagtatttagatgaatgctgctgtttgtccttaataaataaaacattaaattaaaaaatgaagtatttagatataaagagggacaatgcctccgactaagtctcaaatgtctcagaaaataataaatacagtaaatatgcatctgtctgtatgtgtggagagagaaggagaaatggaggagaagagaaaaaaaatgataaaataaatgaagctagatacaaattactaaagaagccagaaagaggtataggggaattcatactactattcttgcaactttcttgcaagtttgaaattgaaacaagatgaaaagttgccaaaaacaaaattgtgaaagaattcttccattcccccaacacagtaaaaagaaaaggaggaaaaaacaaaagaaggaaggaagaaggttaaggcaggggagtgaaggaccaaagtagggagagaagaaaggaagggatggagaaaggcagggattggggggaggaagggcttcctgtctctaaagtctgttattctcactatatacacagcactgcctatttacagtagaaaaaggttctgggttagtaatctacccatcattctatttggaatttgcatacaggaagaggggaaagaaaaccaatgggggtggagcgaacggggaaactagcccataacacaaataaggaaaaggtttgtgtcctcagaacagagaggacacatatttctgatgtgatgcttagcagagttgtacaaagtgacagccacaataaatgaggatgtgaggcttccgtatgcagggtgatgggcaactaaagcactcccagtatctccatccacccctctccatctgccacacctgcatgaccttattactatacagtataaaacaaatccagagtcattaaaagtcagcacactagtgacaagaaattatattcccgtggccctgggaaccacttgtatggaatgacgatcttcacttagttgcttggagccaactgttctttatagcacataaccaagagattcttcttaaataagtgcacaaataaaaattagcttaaaaatagaaatgatgacaaaaaatgaggaagccttaacgtgaaaaagttttgagagagaaaaatagtcttctgacaatgagttataatctcggaatgctaatggcgtccctgcaagcaagaggaattataattggtctctggtggcctgtttatcctgtctagatataattaaaagatacagctcttgcagtttttaccgattcattcatccaacaactaacatttatttagtactgactctgggcctggcactgtgctgggtgctgatggtgcaaagataccgcagcccagtgagccaagaagctcaccatcttgagggagaaataaacaaaacagaatttcacaactcaactgctaagtgacagaagacagacagagccaacccttctaactgcatcaaggacagagtcactaacattgcatagggtttctagaaggtcttcacaaaggaaaatgcacacacatttcccttcccaggattccatgtacccatgtcccaacatggaagctgtcctgcataactcaatctaaaacacccaggacacatgcagttggttatctctgattttcccaatcatatatgcactagagttgttggcatcagaatcaactaattgttaagttctaatgagagtgacaagtcgaatgaacagatgtattttatccatgaagacgtgcagtctccttgggagttgaggcacttcctccaaaatggcactgctttgagtaggcgtgtgtttatgtacagcacagatgtagcaatattcacaccatccggatcaacagagagcccccaaacacatcgggcatctgaccagcccggtttgcttctttcctcatcacccttttagctaacagctccctgaatcacctcctaatagatacacactggcacctgcaatgtttggggtatcacctacagactagctaaatcagaaccctgccttcctaggggagctctacaaagcacacatgtggccttctcttccttggctaatgatactcacactgtcatttactccacccacattgtcatttcctagctaaaaagaagattctttctgtgttccacagctctctggtactcaaggggcaagtccccccaaggccccttggcctccagggtctggggaaatagctggagcaaagcacacatgggccagaccagacaccccacattccactcccatcagatctccacgggaggaaaagcagaggtcctgcaggaacacctgggagaaacagacaagcacagtctgggccatggtgggtgggaggttcaagatcacttctgttctcgcagccacagttcaaatcctatccattcaagtaatgagaccagcatctcacttggaatgaaaaatacaatttatgtgaactaatttgttctgcaagtgatttgtgcagatagctttttgaaggcttgtaatattttccaaatatttctaccaaaaaaaatgaagaagaagaggaatattgctgacaagaatggagtatttggaaagaaaacaaaataaaaatcatgcaaaaatgcctttagcattatttttcatggtattatcagtctttaggggtaagatatttggttgtcagtcgtaaccttggaaactcgcctaaccaacttccaaatggaaaagaagatctagttggcaaagttcactgctcaactgccaaataccccaactaaatgatattatccaggttcattttgcaaaacaaatttaatttcttatagagaaacttgaaatttataaaagaaccctggagaatttggattttaataatcaattattcttcagcctgattcatcttataaacacatggaatatgcaaaaattaaattagtttaaaaagccagacctttaacgcatagttgaataaaacttttacataaatgaagagtaattgccaaatgttctgatgctgtaatacaattttttagctctatggcgtataatgtttctgcactttaaaaaagaaaataattcctttctctaacgtcactgtttcccaaacaggaaaacaactatcttctgtatattttattatactcataattaatgcttatgaatttttacatcctttacggaccaatttttcctaaaatgctggaataatcctggagctatttgcttctataaggcaaacagaaagggtcatgccatacagcatcatttgcatggatcagtggaggagcagcagctaaagaaaacaagatggcccattgtgacctccccttgagccacaaaggaaaaggtgcaaggacaaatggaggcatcctgatctgaaggcaggaaaagtctgcactggatcatcagctgctggtttgtgaacaagggctccagaagcgagtagaaaatcctgcctgtataatcatttaacaatgggcacagaatcttgcaaacccaaggataccagactattaactagaagacactgaacatttatactattcctttcactgcacatctttgactgatagaagcacaaatactttaacacagcatctcccaaatgcctgtaaatgtttggccacatctgcattcttcacagtgactcttcttatttgcttacatacctatcttagtcttctcctaatctatagacacacaagtctgctaaattttcttcttaattgtctaagtaccacctaaaattatctcacatcatactagggttgtttctttgagaaggaaggcccagggtccaagtaggttcaaggatttacctataaatctcagcatcttgtccaacagaaatctaagccagctactgctgctaagcccaaatcactctgatttctcaagccttttcttcttaaaacaattggtgtttggtttcctgtcctcgtgatagtttgctgagaatgatggcttccagcttcatccatgtccctacaaaggacatgaactcatccttttttatggctgcacagtattccatgggaaggggaacattacacaccggggcctgtcgtggggtcgggggagaggggagggatagcattaggagatatacctaatgtaaatgacgagttaatgggtgcagcacaccaacatggcacatgtatacatatgtaacaaacctacatgttgtgcacatgtaccctagaacttgaagtataaaaaaaaacaaaaaaacaattggtgctatagggatgcttacttccaaaacatgctcatggctgaactgtgagctttctccaacctaggtcgagtaactggttaccttgttcacgagaacagtgctgaccaaaatcaaacacgtgtaatacttcatgtcaggtataagtcaacttatgggacagtgcccacaggtgctgggcagtcattccctggacggacttacgctcacagcttctgctttatattcgtcatcactgtctggggcagagagctgcaggagaatgggacatactttgttttcaacatcatgctggaaaattaggtcttgttccagaagaatcaagagcacttcctgacttgattttctcacccagaagggaaaaaaacgcagaaggtgaagcacaagtgagcagaagtgccctcaggatcaagaccaaccccactgagcaggggtggctgagccggcccctacctacccccacccccataccctaaacaccctgaagaccactgggtcttcctgcctgaggcctttgaataggctattccctctacctgactggctaccactcctccgctccagcccaaagcccctctgctcctggaccctgttcgaacaggtccctaaacaatactcgactagtgccctggactttttcttccacagctcttgttccacatttctgcatttatatacatacaaacatatagagggttattttctgtatgatttcataattgccacctgtctctcctgctgcagagagtgaattcagaaggcaggtaccacatctgatttatcctttgtcttccagtgcaccctcaggacctggcagcctgtggcacaaaattttgcgttctgtaacgatctgctgaatcaatggatgacttcgtgccttttctcctttgtaggcagagactggaaaacactgcagcaacctcctgtgactttgtaaaccctggcatgccacacctgagatgggaattatgtctggtacaacagaacgcacagggaaggggcccaagaaagagacactgacaaagggggatgctcccacagaaaacaaaggctcccccagtccacagaagaagaaggtggaggagcacttgttctttgcagtctgcatggaatgagcaagcactagagctcagaggggtccaaagaagctgaagagacatttttggggaaatgaaagcacataaaactccaacttatagacaaaataatgaaatatgcaattcaccgcagtgatgaaaaggcaggcaaataataacaggagccagaggtgtgtagatgagtcacagatgatccgtcgacagcaggttataaaaggttataaaagagggtgagcctgtgagactcaagccacagaggcaatatgacattaacacttctgaccaggcgacagatgaaaacagtatttcagaaagatcatcctggcagtagcgttccaagtcaactggagacaatgaaaagaccaagagcaacgaggtcagcaaggtagctactgcaaacatccaggcaaagggaagagactggggctggctgccaggagtgaggaaagctgatgccccagcagcaccacccgggcacagcgacaggacccgggtgtcactaggagaagaaaaggcccatgctacctctaaagtgtcacactcggattgcgtgtccagcatgtgtcaggagttgagagcatgaggggactacagacaagaacaggcaagcccacgtgccgctttgctgcatgatgctaccctagctgacatactgagatgcatggaggacaacaaggatgggagggcacgccaggcaaggagggggaaggccctgagcagccactcagtatcagatgccaaaagacacctaggagtctgcaaagggtagtgggctgaatgatggcccccaaaaagatctggccgcatcacatctctgaagctgtgaatgtgaccttctttggctctctgctgatgtgattacggagcttgagatcacccagagttacctggacgggccctaaatacaatcacgagtgtccttacaagagaaagacgagaagaaaacactgacagaagaggagagaggccatgtgaagttagcagcagagattcaagtgatgtggccacaagcccaagaagctggcaaccgccagagactggaagcagaaggaaagattctcccctagagcacccagagggaacccaccctgacgaccccctgatgctgcacttcccacctgtggaactgagagggaagaaacatctattgttttatgctacgcagtctgtggtaagttgttacagcagctccaggtaatgaatccactgagcaagggtagcaggggagaaggccttccaggaccagagaacaaacagcacattctaaggtgcaaggtgatgaactctggggccaaatactctgaagaagtaggacaagttccagatggcagaatgggaggatgaagggcaagtgaggtcaggccaggaaaagcatgcccgatcccactaggacctctggtgaccactccaggtgcaatgggagcccccaagggtttaacagcagaggaccaacacaatcacacctggcttcagtgagggtgacagtctggaaacctaaagtggttctgacaagagagagcaggtgaggggctcctgggccactacaggctttcatgaggcatgatgtcagggcaggggacagaaagaagagggcaggtgtgacagacactgctacagagagctgagaatgactacacaggataatcacagaagtcagagcaagatggaggatagagagactagggcgggacgctagagtctctaaactctatgggattcgctggacatctagacagagccatccagtaggctgtggcgatggagggcggtgattcacagactccagagacctgggtgagagacagcagtctagtgttcagttgtgtgtagagtctccctagggccacagcagcagacaaggccatgaagggaaccctgatatcataagaaaaggaagaccaaagataataccctagagatgaaacagcaactcttaggggcaggagaggattgggctaatgatggagattggggaagacacagacaagaagtgcgggcagaggcagggaggaggcctggagctcaagagctaacacggcagtgggtacaggctccggctgtggggtctgaatgctgagcccccatctggatcctccaagtgactagctgagtcatcttggccaagtgacttggcctctctcagcctcagtttcccatccataaaactggataatcatagtatctatctcataagtttgttgtggggatgaaaggagcgacaggcttccgatggtgtctgggacatggcatgcactaaatgaatactggctggtactgttagtacaaccatgattattggaagccaaaggagacaaatatttagaggatcccagcaaggggtgtgtccagttacctttgcatcccactgtctggggtgaagcaacactaaatgcctagtgggatccagtaaaggtctgtgcaaacactcaaaactggtcaacagtgacaaatggtgcaaatgggtcaaacaaagaaaaaaagtcagtgagtagattaagaaattgtgggagaaatataaatactatatagcagctaaaatgaaatacaaatactataaagcaggtaaaaagaatgaccagcagctatcccaatcaatgtggaggggtctaagacacaaaggagtcacgcaatcggcagaatggaatacacgtccaatgatgccatctatgcaagctttcaagctcccaaacaagacactctcttattcaggggccacctacacaagtggtgtgagtgtgaaaacctggtgagaaggtctcatgccaggctcaggaaggggagggagggagaagaatgggatggaggaggggtacagagaagctgccaccgtatctgtaacctctaaataaaaaataaaaggatatgcagaaaattgcaaaatgttaacatttgttgaatatgaatggtaggtatatgggtgtttattacacaatgctgtcttgtgtgattaaaaatctcataacattttaaacactgaactattaaaaaaaaaaaaaagcactggattttacaatgagcagattcactgagtccgtggcaagatacctatctaccagcttccagaaagcatcagctgccgcacgaggagctagtgccagaagaagagcccagaggtagaggcagtggaggttcctctctgaaaaagcttgacagtaggagaaggagtgggccacaagctctgagtcaaggccagggaacggagagagcagggagactgaggactgattataatcaaacaagaaaccaatgagagagctggaaaaataagcaagctctgagacaacaggatgggaccacagagagaaactaagacatgagacttaaaaagggggtgggacatcccttcctgtaagacagaggggaggagctcaggaccactgaagaaatctgcctacattatcaaacggcatgtgcagctgattcagttctacaaatctttactgaaactaccaggtgccagaccctgtgctaggtcacggaagccaacaaaatacaatcctcggctctcactcaagaaggggagagacactttggcttacaacatctagaagagcctccacagccccatagcatgcaacaggcagcctcatgaaaccagacatccagcctcctgccttctccagctgctactcagcacccacaaccacacctctctgcttaactagcaactcacccatacttcacagtgggggtgaacaagaggaaaggagataagccaagctagcctggagcacagccctggagcacagcgacaactcaaaaaaggggtgctgtgagtggcagcagtagtccttgcaatagcactgatattacccccaacgttgtgaatttcatgcctcacacgttcggtgaccatgaagagtacctgctgatgaacagagaagggccagctggcctgagatgcagacgctagctggaacctagcacacccatcccatccccacatgcacgagaatcttcgtctttgccgaattaagaatcctaatcggggacctttgggtgttttcaggggcccccactgtggatgtcggaaagagtcagcatctgttaaaggaagacagagactgacagaagagaggagggggcatttgggaagggcaagaaggtcagaatcataaggacagaggggacaggcagatgccagcagagtcaagggcagaaagggacaggtgcccaggaaggagtctgggctgtgcctcagggaacaagaggtcagcgagaaagaacttcagcacttttctgtgtttactaagggtgggaatgaagaggagcgggtgccctcaaggggttaggtacttttgatggaaacaaaggagacagggcttggctctagctggatggaggaggtgaggggagaggatttcgtcagttcctgggtggcggctctggggagtgtgtgaagtaggtggtggttccctgcatggagataggggatgaagattgaaggcctctatttgctctgagtaaaaggcaaggtcatctgcttggcgcgaggcaggcagaggggagaggcctgatgaaatggcgaaggtctaagagaactgccaaggataatgggaaatgcagctgatgagggacaagggaaaggactgccaagcaatgctgcaagcccagccacgactggaacccatcaatttgcaacggcaccaatcagtgcatgacaggactccctccaccaagctcggccacaagcagtggaggacactgaagggctggggaggacaggcaaagccagcgtggcagaagcaccatcaaaaggacaagtaaatagagggtgatggcagggacaggcctgaaagggtgggacaagagagggagccgctgaggaacaacaggaagtaaatgcaggcaggaaatagaggctgcagagccagaggcctgtgggggcaggaaggcccacggcaggggagcaaaaaaaggagggcaagctgtgtttgtagtggaagtgggagtgcagaggtgcggcagatctgcacacaatgggaagctgggtgcggacacattgggaagctgggtgcacacacagctcgggctgaccatcggagtgcctgctctcgaccaagaatatgactcttcagcaaacacagactgagtgtcaggcaccatgctagattctggagtcaaaaccacgcttcctgcctcggctcttctggaagagaagatacagcaatgctactggacaaaggtcaagaaatgtcaaatcccctgactcagtgtaatctcattttcaagaatgaatccaaaggaaaaagaaaagtcaatgaaaggacaaaaccacatcctttccgatgttcactgcatctacagcacacacacacacacacacacacacacaaaacctgaacgaaatccaagtattcaacaaaattaaaaatatgacaattatgaggaaagtgttttactgcgtctgtaacaaacctgcacgttgtgcagatgtaccctggaacttaaagtataatttaaaaaaaaaaaaagaataagtactataacagtttgaaacatatctactatgttaaaatgtgggagttcctaacaatactcaaaaaaatttttaaaacctaactggtaacctttgtagattattaaaacgccaacgatgatcctggaaactggtaaataaagggataaaataaagcatttattctatcttccctattcaaacaggttttcagggctatcaaatagttgatagaggaaacctttacagaagaactctagctattaaactaaaaagagatgttggaattagtgtgtcagaatttacagcctctaatgagatactggatcagggcaaccatcaccaatggttgctcatacgatgatggagaactttatagaagtttggccacctttacagaaaaggtggccaaattcagcattaggaaaagataaccatccagagcttttctgcccccgatttgatatagcaggaaaacacaaaccatctacaaagtattctcactaaataaaaaatctgagtctggctgagcttccaacttagctactagtttataagaaatgcctggagtagagcaacatcttaacactacagagatgcaataaaccatatcccaaatgtgggaaattctataaaactaatgacctggcttcctcaacaaataaatagcaagggaaaaaagtggggaggagcaacattataaattttaaaagatctaagagacatatatcacttagattcaatgtgtggacattgtttgtattctggtttgaacggcctctgcgcaaaaacacacacttatgagaaaactgggaaatttgaccaatgactagatattagatgacattagataactactgataatttttatatttgcattaatgatactatcgtttttttttaaaagagtctatttcttagagaacaatactaaaagtatttacagctgaaatgagatggtttctgcaaattcttttgtctggattggattttatctcggtaagataaatgaaaaaattaatcgaattttttttgtttttatttttttttgaggcagagtctcactgtgtcacccaggctggagtgcagtgacacgatctcggctcactgcaatctccacctgccgggctcaagtaattctgctgcctcagcctcacgagtagctgggactacaagcacgcactactatgcccagctaatttttgtattttcagtagaaatggggttgcaccaagttggccaggctggtcttaaactcctgacctcaggtgattcacctgcttcagactcccaaagtgctgggattacaggcgtgagccaccacgcccggccaggtcaaacgttaacaatggttgatgccaggtgtagggcacgtgggcattcattttcatattctctctactgttatgtgcgtttgaaaatttccatagtaaaatgctaaagaaaaaaagaaatatttcatgataagaatgagtgctgtctatcttcctacatgactagaggaactggacacaaatagaccttttgttctagaatcacttaactctaagaagttgttttttgtagtatgaatatcagctaaaacaagactaaagagaatttgctaaagagatcttaaggttataatttttcaaacctgattgtttggatctgtgaggtacctcactacaataggtatgagatattcagagagcaccactggaaaatttgatctgttttcttgtaaaaaaatggcaataggaggaatctgttccatcagctcagtccgcactgtgggctctgcagcaataaaaaatttaaaaaaattatattaagaataagccaagcatcttagatagtatatactgatagtttctagcttttcttactaaaatacttcatcaaggaaattagacaaatgcagtttaaaaatcatttcccatttagagtatttatgctacagacaggcttaaaaagctaatgagctatacagcaatataaaaacataaaaagaagagagaatgacaactctattataacaagccatatataaatttgaggagggagcaagaagtctgcatgctgggccagcatccaaaagccattacaactaatgccttatctgccagacctatgggttgtgcttatttaaattctagccagaatgtatacattataaataattctttcataaatgcactccgccacaatccacgcatcccaattatttctaaggcaaagcattaaacaaaagagcggctctagctccaatataccacattaaatttaacacaaatgtataattgctacagcactgtaaacggtgactcatttacaaagagaatccatttaaagactcaaaacatccacttgggcgtttttaaaagcattgcgttatattcatataaatattttgaactaatgtgggagctatatggaaggcttatttttctattttcagttaaaatgattaaactctaaaggctgagagtcctgaaactttctgaagcttctcatgattcattctgaatgcaggaaggagggggctgtggcacagctgtcagtaccggccagccccgccactcattcatctaactcatctttactggggcgggggggaagacaacatcatcatatctgctgtacagcaacgtgcttttcttccacgataccaatcatggagaggtagaatgagaaagaaaaatcaagattcgcctagagggaaactaatgactgagattttcgaacccaagaggcttcttttgatttggcatttcttagcaaccagtagtctggcaaaactcaagaaataccaaaggcctaactgccaaggcaaacagcattcgtagccattaatcattttaattttctaaatataagaaaatttcagtcaaaattcaaataagacatacattcttcaagacaaaatccattcatggttagaaactgcttaaaggttattgattaataaacaggttttttaaaaaatagctattactggttatacataatttcttagaaattcataagtaaaaaataaaattatacaatccttatacaaacctgcatcttctgacaatctgactacaatctccattaccgtgaggaagtcttcttcattgttaccgaagtcccggaagatatcaagcagccctctggcaataatctgcctatggagacaaaaacaatgcatatggttattggggccacattgactgaaggaccacaaggttccaggcattgcgctaagagcaggtaagtgcacctgggcacaagacaaaatgagcaacctgtgtccagaaggaggacggaggctacccaggaatgcccagcgacggccattccagcatgggccacagtcctacaggaaaggaggcctgcatcttctagtctggtagtcatcagagtttgaaaatgtccacttgagaataaggcaaaacctttttctcattttttggctggttcctcaggcctacataggcttagaagaaaagctcaagacagttgaaggcaactaagggaccaataaatgcagaagagaaaggcccaaagaggcatctgatggcctcttaatgactgaatgagtaagtgccaactagaaattctgcagaaattctcttggaaagccttgagagaatttttaaaattccgttatttctccacatttattatttttactttcctatctccctgtgctgattaaccataaaacctgtaaaatgagaaggagctacagatgtttattttgagggcagcaagggaaggaggagctggggacactgcatcccactataggcagaactggtcaagagaaccaagatagagtcagaagtggcaactaccaaaaggaaagagaaatcattgcagtccactggcctgagcaatgtacaggagaacagttaagtcagcccgagactgaggaacaggccaagactcaactcagaaaagtctcaccacaagatggcaagcaacagaggaatgatgtgcactatggcattctacacagaggaagctatggccatggggggagacaatgtgattgtcattgcaggaccaagtgatgttgtcccatcataagcatgatctgagctagagctacaaaaggcctactgaggagacacgtcaaagatctctgcaacagctaattccatcagtatactgatcaatggagcaggcggggggcaggggtaccctaaggtgtggggccttcccaaagagtggacccacaagcccaggaggccactgtgaactgtggaccatccaaagacaagaaattaaaaaagaataaagactcttttagacattcaaaaaatctatcaccagcagatctgaactataagaaatgataaagaaaatccgatggaaatgtgaatctgtagaaaggaataaagaacaccagaagtgataactacatgcatagatacacaaacttttatgttattatttaaatctctttcagaaataattgactaagttaaaaataacactttattattattgtggatttataacacatatataataaaatgcatgacgaaatcacataaagaccaggagaggggaaacgaaggcatactatgataagttccttacactatacatgaagtggtaaaataccactggaaggtaggccatggtaagttaaatatacatactataaatgctaaggcaaccactaaaataaaaaaaatgaattataactaataaactatttaaaaagcaaactaaaatcacaaagaagttcaattaactcaagagaaagcagacaaagaacaaaaagggaacaaaacagatgtgacaaatagaaaacaaacagcaagatgatatacttaaacctaactgcatcaataattacattaaatgtaaatggtctaaacattgcaattagaaaaagattaacagaatggataaaaaaaaagaagacccaactacatattacttataagaaacacatgttaaatatacagatgcaaataaataataaaagatgaatatattatgctaacaatagtccaaagaaagctggagtagctatattaatatcagacaaaacagattttggagcaaagaacatcaccaagggaaaagaggtcatttcataatgataaaggggtaaactcatgaagaagacataattatctcaaatgtttatatgcctaataacagagtttcaaaatacatgcagcaaaaaccaatacaactgcaaggagaaatagacaaaagtaaatgtcgaagtccagaaacaaacccacacatataccaagtaatttttttttttttacaaaggtgaacagggaaagtcttcaaaaagtggtgctagaataaatagccatatggggggaaaaaaaattgactcttatttcataccataaaccaaaattaattcaaaatggacccatagatgtaatgtaagaactaaaacataaaacttcttgaagagaaaaaaaaatctttgtgaccttaggttagacaaagatttctgaggagccaaagtatacaaaccataaaagaaaaaaattgataaatttgacttcatcaaaatttaaaactttgctccctaaaccacaccactgagaaaataaaaatcatgagccacagactggagaaaatatctgaccaaaactggtatccagaatatataaataatccttgtactcttataactccataataagcagacaaacagcccaattaaaagaataagtgttcataaatgagcccagcacattattaatactaataaccgaaagatggaaacaacctaaatatctgtcaactgaggagtgaataatcaaaatactacgtatccattcaatggagcattattaaaggaatgaggtactgatgcatactactacaacatgatgtagctttttttaaaaaaaaaaaaaaaaaaaacaacacagggtctcactctgtcacccaggctagaatgcagtggcacgatcatagctcaatgcagccttgaactcctaggctcaagtgaaacatggatgaatactgaaaacagcatgctaagtgaatgaagtcagtcacaaaagacgacatactgtatgattacatttctataaaatgcctggaataggcaaatcaatgaagacacaaagtaaaagagtggttgcctagggctgggagattggagaggaatgggtagtggttgctaatgggaaccaggtttcttattgaggtgataaaaatgttttaaaattcattgtggcaatgttgcacaactctgtgaatattactacaaaccatcaacttgtacactttaaagtggtgaaacgtacgacatgtaaactaaatctcaataaagttcttttattcttttaaaaagcaaaagattttaacaacttcacaaaagaaaatgtacaaacagccaagaaatacaagaaaaaaattctcaacatcttcagaaaactacaaatcagccaggcacagtggctaacacctgtgatcccagcactttgggaggccaaggcaggcagattgcttgaacccatgagtttgagaccagcctaggcaacatggtgaaaccccgtctctacaaaaaatacaaaacttggccaggcatagtggcacacacctgtagtcccagctactcaggagcgttggggtgggaggatcacttgaacccagaagacagaggttgcagggagctgagatcgcaccactgcactccagcctgggtgacagagcgagaccctatcacacacacaaaaaaaaacctgtcaagatcatgaaagacaaggatagaacaagaaaccatcacagacggaggagcctcaggagacatggcaactgtaaatgtaatgtagtaccctgatgggatcctggagcagaaaaagaacattaatggaaaaatgcagaatccaagtcaaatctgtaatttagttaacagtacaccaatgccaatgttattttcttagttttgatcaatgtcacatgcttatttaagccgtaaacattagagcagtttcctgacctcagcgttactggtattttggagcaggtaagtctttgttggtgggggcgggggggggggggctgtctggggcacggcaggaggtttagcagtgtccctggcttccacccaccagcagcaccctctgtgccccaagatgtgacaaccaaaaacgtatctacacattgtataagatcctttgggggcaaaattacccataattgaaagccactgcattagaagttgggcaaaaggtataagggaactctcagtactatctctgcaacagtcctgtaaacctaaaattatttcaaaataaaaatcttaaacacaaaacaaaacacaaggccaaaaatgcaaaagctacgatgaggtaacactacactactagaagaactaaaattataatgacaatatcaagtgctggcaaagatatgaaataggaatccacagacattggtagaaatgcaaaattgtacaggtaatttggaaaacagtgtggcaattcctctaaaagctaaacatacacttaccagtcaacccagcaatttcactcttaggcatttacccatccaaaatgaaaacatatgtccacacaaagttgaatgcaaatgttcatataagcattattcacaacagccacgaaatggaaaactcccagtgttccctgaactggtgaatgcgatacaaaacagagtatctgtacatactcagcaataaaaaggaatgagctattgataacaacagggatgaattctaatgcattttgctaaggaagagaagccagacatgtaagagtacatcccatatgactgaatttatatgaaattctagaaaaggcaaaatcttttgaaaacatcagaaacagggtcagtggttgcctggccctatggtggtcagggagggagggagtgccagacagccaaggggcaaataagggtacttgtcaggtgactgaaacttttgaactccattgtgacaatggttggattactgtatacatttaccaaattcatccaagtgaacgattaaagtggttgaagtttattgcatataaactatgcctcaataaacgctctttaaacaaagacactgatgagggataaagtgagggccatcagcagtggcctggggtgatctggaggcctcccatgcaagcagaggaactggagctcctgaaggctttctctgatcacgtaaaaaggggcccctgactgcttctgtccactcctctgagcaacccaccatccaggaacaatgcatgtcatttctggccatgcatgcatcagaagaattcaatgaagttgaaaacccaccctgacttgcaggcaaaaaagactagaaatatggaattctaaggggcagtcctttggcccagtatattacaggaagaaatccatcaactcaagcctgtatccagggagatttataccaccctcgggatgaaagatcaagatctggcagccaagaggttttggaaagtcagaatagccactgcagagaaagtcactaattacatttcactagaccacattcattcagcttcccttgggaaatcaagcaactaagatccccaatctgcttctagggccatagaacagagaggcaaatctacatccagcctcaagtggtcacaagggacctgccctcttaaagaaagcaaggaaagggataagagaggacccctgaggcagagacaactccacaacagaacaggagtgaggtaaagactcaaacaaattggtgctttggaaccaccattttggaaaacctggctgctttgcaatgacctggagagcccacagtggatgagcagagtcctgaagcctcggcctcaatacttctcacttgtttgttagctttgttaataagatgaaagaagaaagcggccctctggagagacaaaccctgcctgactcagaagagcgcagggagactcagcgacatggtgtgtagcaagcacaaagctggggagtggcacactgtaagtcctctacggcgccagccactagattacaagacatgcagctgccaacaacaaatgaatagagagaagcttaaataaattacgatctatctatacccttgcataccatgcaactatttgtatggccttagtacctctagatatgtactaagttagaaagatatccatgatacattaaatgaaaaaaggtgaaaaattttgcatatggtatgagcccatttcttatttttttttttttttttttttgagacagagtctccctctgtccccaggctggagtgcagtggcacaatctcagctcactgcaacctctgcctcccaggttcaagcgagtctcctgcctcagcctcctgagtagctgggactacaggtgcacgccaccatgctcagctaatttttgtacttttagtagagatggggtttcaccatgttggccaggatagtctttatctctgaacctcgtgatctgcctgcttcagcctcccaaagtgctgggaatacaggcgtgagccatcacgcccagccaagcccatttcttaatacaagttacatttaggtatacatgtgcaacacatgtacacataaacacattcatatatacatacacttatttaggaagcaatctagaagggtactcaccaaacttcacagctcttcccaaggttgtagtgggggagggagggaaactctatttaaattcctgaagttgttaaatatttcaatgggcatgtattatgtttgtgaatttttttttaatataaagaggatggctggggaggccaaggcaggcagatcacttgaggtcaggagttcaagaccagcctgtccaatatggcaaaaaaccatctctactaaaaatacaaaaatcagctgggcatggtgatgtgtccctgtaatcccagctactcgggaggctgaggcataagaatcacttgaacctgggaggcagaggttgcagtgagctgagattgcaacactgcactccagcctgggtgacggagcgagactccatctcaaaaaaaaaaaaaaaaaaaaaaagagaatggcttaattttacgtggcaatataaccaatgttccctggaaatccagccatggaagtatcactcaatcactcagttataattatgtgttaagcccaaccaactctagactcaacgcaagaagcttgggataccaggataagcaaggtccaggccctgctcttaggagctttacagtctaggcctggaagtaaacaagaaaattatgatgaccagtagggacaggacccacagagagtgcccacaggatatgacagaaacacagaagaacacagaggggctagccagagagatgaggagtgtgaggatgagaagttaggcagaaaccccggatgtcggaaagatgagacgaggactttaagataagcgtgaacagcatggaaagatctagaggaaacccggggcacactgggcagctacggaatgcgggaactttctgtatttcccactcgacttttctgtaaatctaaaatcccgccaaaaatagtctattagttaaagaaagaatggaaatgaaacgttttttcagataaacaaaagctgagaaaattcactgacaacagtcttgtacaaaacaaaaattgttaatggaagttcttgaagcaaaaggatacctgatagaaatgagcattttacaaaaagaaacaaaaaacatcaaaaatggtaagaaaaaaatggcaaatatttaaaaatctttttcttatttgtaattgctttaagatagttgctatataaagcaaacatagtaaaaaggtattctgaaatgtatgaattgtgtagaagtaaagtgtaggaaagtaacagcgtgaaagatggaggggaagaggtggaagaacaccgttgtgaggctcttatgcaacatctccaactctacagcatggaaagtggtatcattttgaacatatgtcatgatgaataaaagaagtatactgtaatccctagaaaaatccataaaaatgtttaagaagaggtactgtataacgagtaagccaacagtggaaaaaaactgatatatttaaggcaggaaaaacagaaaacaagaatagtcaaatacaaaataaataccaagatggtagatttaaacaaaccatatcaatagtaacatcaaatggaaatgatttaaacattcaaattaagaggcagagattgtacaactggataaaaaagcaagacctaattatatgccttctataataaacacactttaaagacagataagtaaaaaataaaagtatggataaaaatataccacacaaacattaatcaaaagaaagctagagtgtatatattaatatcagacaaggtaagcttcggaaaaggagaatatcactagggaaaaaaagggacattacacagtgttaataaatcaggccgggcacggtggctcacgcctgtaatcccagctttgggaggccaaggtgggtggatcacctgaggtcaggagttcgagaccagcctggccaacatggtaaaaccctgtctctactaaaaatatgtaaattagctgggtatggtggtggatgcctgtaatcccagctactcgaaaggctgaggcatgagaattgcttgaacccaggaggcagaggttgcagcctggggaatagaacaagatactgtctcaaaaaaaaaaaaaaaaaaaaagaaatcaatttatttaacaaaccagaacaatactaaatgtgtatgcacccgacatcaaaacttcaaaatacgtgaaatatgtaaaactaaaattaaaaggaaacgtagataaatccacaattgtcgacgcaggtagcaacatttctcttagtaatttacagaacaagtaaacagaaaatagataagcatatattacccttgacctaatttataagatatttgtaagatactctacccaaaaaacattgcagtgcattgcaacgcacattcttttcaagcagacatgtaatagtttactaagatagaacacattcggagccataaaataaatctcaacaaatttaaaagagaaaaaatacaaagtatgttctctgaccacaaacgaattaaactaggaatcaataacagaaagatatctgcaaaatcctcaagtatctggaaataacacacttctgaataactaaatgatcaaaggagaaatcattaacattaaaaatacttgtgctgagaaataacaaaaacattatatatcaaaacttgaggtaacatagtacttaagaggaaattgtacaatataaaatgcagatgttacaaaagaaaaaccaaaaaaacaaaaaactgagctaaatatccttaaagtaagaaaaagaacagcaattaaatcccaaaagtaaaaaaaaaaaaacccaaggaaaaaataatacagattagagcagatattattgaactattatagaaaacaaacatacaacagaaacaaagccaaaacttgagtctttgaaataactaatgaaattcataaccttctggtaagaattatctagggggataaaaaaagagagagagggcacaaacaacaaataacaggatggaaatggggacacaacacatctcacagacaataaaaaaaaaattgtcattttccaacccagaatgaaataacagatttaagcaatgattatttgtgaatcctgaaatcatcagaagaaagactggtgaggaattttataatgaaagaataaaacacctgagcccactgctcaatatgaaatctctaaaggtgtgacaactagacattgtttcctggtgtcttgtaataagaatttcacaaaacaacatatgaagtattgcttaaaaaaaaaattgaagcagaatataataaattctccaaacgtaattttcagtttacagaaaagacagggaaaatgataccatgagaatcatgaccaccaaatacagaatgtggaaaattctctaagctaatgaccgcttcaacaaataaatgatatggagaaagatgaaacagagaaccatttgagattaaaaagagtttaagatcaaaaggaaaaaaacctgtaaacaaaaagagacttaagagacacatctacctaatgaaatctatagaccttatttggatcatgactcaaacaaatcaaccataaaaaggtattttttagtcaggaaaactcgacatagagtgataaactagaaagcattgttgttaattttgttaaatgtgataatgatagtacagttagatttgttctaagtccttaactggataaaatatgatgtctcaaatttcctttaaaatacacaacgaaaaaaagcacaaaacctctgcagagaaaatgatcagactgtattgagaaactaaagaaaacctaaataaatgaaaagataaaccatgtttacagattggaagtctacacattgtaaaaagggcaatactctccaaattgacctatagattcaatgcaaacccaatcaaaatcctaatagatgttctgttttgtttcattttgttagaatctggtgagctggattttaaatttacatgaaaatacaaagtaccaagaataactagtcatgccaaagaagaaaaacaagatgggaagacttgttctatcaaatatcaagactcattataaatctatagcaaccaaaacagtgtagtattggctgaggggaccactggaaaagaggggagagtccaaagactgtaaacagaggctggactgtaacagaggtggcactccagagcagtgggaaaagaacatacttttgataaatgacattgtgacaattaggaaaatgaagctggagccatttttcctatgataaaaattaagttcaggcagattacagaactatagtatatctatttcacagaaaaaaaataaaggctttaaagcaatataaagaaatagagaaaaaagcttctgaatgcactattaaggaaaatgtcaataaatttaactacattaaagtgaatacttgtgtgcctggcacggtgctcacaccattgaggccaggactttgaaaccagcctaggcaatatagtgagaccctgtctctgtgcaaaataaagtagctgggcatgctcctgtagtggcagctacttaggaggctgaagcaggaggatctcgagcccaggagtttgagactccagctatgattgcaccactgcactctagctgggtaacagaacttgttaccttgttacccaaagtctcaaaaaaaaaaaacaaaaaataaaaataaaaataaaaaaccaatagcttctggtcaccaaaagaacaccataaagagagtttaaacacaagccaccagttgaaagatgtttatcatacataattaataaaggtttgaaatctagaatatacacagaactcctacaaattgataataaaaagacaaacaatccatcttctccctaccaattcaaccaaagatttgaacaggcacttcacaaaaaagaaatacagatgtccaacaaacatatgaaaaagtgtttaaactcacagtaaagaaaataaaaattcaaatcacaaagtgatatcgttatatacactaccaaactacagactggctaaaatacaaaaatctgacaataccaattggcagataaaatgtagggcaaaggtaaggccgggcatagtggctcacacctgtaatcccagcactttgggaagccgaggcaggtagatcacctgaagtcaggagtttgagaccagcctggccaatatggtgaaacctgtctctagtaaaaatacaaaccttagccaggcgtggtagtgtacacgcctgtagtcccagctacttgagaggctgaggcaggagaattgcttgaacccaggaggcagaggttgcagtgagccaagatcgccagcctgagcaatggagcgagattccgtctcaaaaaaaaagtagggcaaaggtaggagtataaactgatacaaccactttggaaaactggcattatctactaaagcagaagataagcatacaccgtcacacagtatttctttcctgggtacatgtcctacagaaacgcataattgtgtgtccccagatacatctacaagactgttcacagcaaaactcttctttaacaatagcagatggataaatgtcagtatattcaagaacactattagaaaaagaacaaattcaaactattaatatatgcgaaatccataaaagtaatgtatcctgtatgatttcccatatataaagtccagaaacaataaaattaaattacattatttggcggtagctagatgccaaaactagaaagacaaaaaagaaaaaagacaccattcaaggtatcatcattccctagcataaaaggagaataacaatggactcatcctgcaacattaaatggatccatccataacatccttgtgagctttctatgatttaatagatgaaagggcttagcctatatttggcatagaatgtaattttcgttttatctttttctttttttttttatagaatgtaatttttgttttttgtttttttttttttttgagatggagtctcactctgtcacccaggctggagtgcagtggcgtgatcttggctcactgcgagctccgcctcccgggttcatgccattctcctgcctcagcctcccgagtagctgggactatgggcacccaccaccacacccggctaatttcttgtatttttagtagagacagggtttcatcgtgttagccaggatggtctcgatctcctgacctcgtgatccgcccaccttggactcccaaagtgctgggattacaggcgtgagctaccgcgcccagccagaatgtaatttttaaaagcaagagccaatgaaggtaaggaaagaggctatgtgagtaccatcaagtcttggcaggtggtgtattagggactacatggggaaggaagtagggaagctcagaggatagtttagaacaagacaagtcagggttgcaagtggggtgaatatgcacctgtaacaggagaggagacacagacgacagaaggcaaacctgaggggggcgagggatcagggacggagggcccatcaaagggcagaacaggaggagagagactgtctgctgagaaaggaggggagaatgctttcagattcacagaagtttgggtagcacgtaaatgtaaagggaagccttaatttctgctttcttcaggatattaagaatcaaggtcatctactgagccaaggtgggcctggagtcgaaccctgccaacaccgtacacggtgacaacggagcatggcatgacacattgccaccgaagttcctgatacacagcgcagtcaaaatacaaagcgggcagacaatgcttccaactgacgcttcttggtgcttctcaattaaggaatgcatgatttttctgagtactgcatatgtgaaagaaacccagttagcaatcctaatcacttaaacaccatgaaattcatcaccatttccttcctggcttaccaggtggtcagcaaaacaataacaaaaataatgaaaaagcctaataagatggtaccattcagacagaagcccagcatcctggtgacaatctgtatccaacctacctcatcatccatgaagtctcctcaaagctgtcacagagaagtggccccaagtgtcagcttaaagcacacaacacagagttgtcaacatacacaggcctggttgggcttaccggttgaaggtgttctcgctgaaagcatacttctccaggcgagtgagtggaggcaggttatcctggcctggaatgtccaagaaggccgttactctcatgttgtcgcaatctgtaccatagtcttcaaatccatctaaaaaggaagagtgaagggggggaacccacgctcaaaagtgtgcatcaactgtgacaagtcacacttgggcaaagacatggccttgtggcatgtgttctaccttcacagctgaagtctctaagaatcgcaacattgagaattcacccaaaatgaaatggtcagttgaagaaccgcaaaagaaaataataggtaccagagtaacaaagaagagccggacgcctttcttttagtgcagtctgtctaatgcatgagtgaaaggaaccaatcctctactggagaactcagcaagtgagcagatgtacacctctaagaaagccctgctgtttaagaagccctgctcaccacgcagggctgtgcaaacaggttaaagcagttgaaggaaaaacaaatcagtttggccttacttgttagcaagactctgacagaaagtccaccccacatccggtctgttctaaacgcactcatgtagcgtcaaagatgccatgacatacattcctatccatccgtatctgtggccccacaacacccaaccacacctctccacacaggtatccaacaagttcctccaactcattgtggccaaaaatgagccaattatcatccttcctcttcctctttttttcttttttttttttctgagacggagtctcactttgctgcgcaggctggagtgcagtggcccaatctcaactcactgcaacctccgcctccctggttcaagtgattctcctgcctgagcctccttgagtagctgggattacaggcatgcgccatcacacccagctaattttttgtatttttagtagagacaggatttcatcacgttggccaggctggtcttgaactccagacctcaggtgatccacctgcctcggcctcccaaagtgctgggattacaggcatgagccaccatgcctagcccttcttcctctttaaacctgctcttttccctcctgtgcagtgggtagctgaattcatgggctctggagccaaacacacctggaatgggatgaatcccacaactaccactcactgctatgtggccagagttcgtcacgtcacctgtccacacttccgtgttctcatcttgagggtgggatgagaccccttccttgtgccatcaggatgctggagtcagtgggaccatgcatgggaagacctgcaggatctggctgaccttgacattgttcacctccctttacttactcccacgtttcacatcccccacagtgttcagaagatgctgttccctatctactctctcccatttagacttaaggtctcagctagggcgcagcctctttagaatggcttgccttcccactctcctcacacctcaagtgcccctggtgatggcaacctgagccagcctcctgcaacaggaagttcactgtttatctgcaggaagtccttacacaataaacgctcctgagggcagaactatgtccagttactgttggattctccaagcctagcacataggcttggtaaaatgcatagtcttaaagtgaatgtactcattatgtgtttaatgagcacctactatgtgcccctggaacattattaaacacataatgagtaaatttactctaagactatgcattttaccaagtatgctctccaacaaaacaccaaccactgaattaacttaatctttccatccactctataaaacacactgactaatcccagggcaatgaacactcatagcaaagaggctactctctaggaataacagtggtaaggggagttgttgggatgatgataataataaaaataatggctacattttttgagctcttataataggccagggacagggaagtagctttcacatgtggttcaattcccacaccaactcaaccaagtaagatttttatccttgttttaccgatgagcaaaccaatacctaaagaagttaggcaactttccctcggtcactcacccagtttgccctaaccagaaggaggctcatgcgcagctattcccaacaggagttacctgcttactaacagtcaggtcctgtgctgttatttctgaacgttagtttgaattcttcagaaagattcaataaaaatgagttattaaaatatagctgtcaaattaggagtagataaaacaagtggaaaatactgtaaacacactgtaaaaagtgacaagggcttacatttgcattgcctgacatacaagtcttctcactccacataagacactgaacctggaaatgtagacgaggccttaccggtgtgatctatggatgaagggaaagggtccatgtgccaagcaaggcaaggccttggctcagatcacacggtcagcctatgaatatccattctttgattaaaattagaagttttagaaacgtagccatcttggccaggtgcggtggctcacacctgcaatcccagcactttgggaggctgaggtgggtggatctcttaaggccaggagttcaagaccagcctggccaacatggtgaaatcccgtctctactaaaatacaaaaattacccaggcgtggtggtacatgcctgcaatcccagctactccagaggctgaggcagagaatagcttgaacctgggaggtggaggttgcagtgaggcgagatcacgccactgtactccagcctgggcgacagagcaagacttcatctcaaaaagaaaaaaaaaaagaaatataaccatctttttttaagaatccctgatatgaccaacttgttctattaagcagtcatcttctcctcccattcctgctagaaaagaggccatcactgaaaggataaggcaggcagggaactacctggagttgagagctaattatcaagaggactcttgctatttccaagacagcctggcagagtttgtgcccagtaaagagaaacacacctggcagagccctcccttctcccactcccccacctagcctttccattgctaacctaggaaaataaagataaagaaacaggctgctgaggacttccctgaggctaattttggcaaaataacagcatcaatagttagttccagaaagattaatcggcacctgctctagaggtggaaatgcatccctcctacccctcgccctgaaaactagacagttggtgatggcactaatgtgaaaaagtagaggagtcctaccaggcaggtagaaaacccaaagtcaatgcaggcagtaatggaaaagagttcaatctagagatgacaagtttgtgcctaggtacttacttttctttgaacgtgaaccacatttttcctcaactaattattttaggctaataatatgagcttattaaaaatttacactgtataacagctactcagagaattttaataaagaattacacagttacagaaaaaatatgtatcacataatcaaatatgccatttctctgcacaatagctgccttggatgaacaggtccacactgagtcacagccaagcccgatgaccagagtcactgcatacgagctattctcaatgcacttcagagtccagaaggaataggcagcctcgatcccacagagagttatatagcatttgcaggcccaggctggaatggacttgaaaacgttaagtttaaagcagtagttcccaagctttggggtaacagacagttttggaacctgaagatatctacagtcatatacattcaatacttttcatacaggatcaggggtttcaaaagatcttctgaggatcactgtgtactttatgggttaagaacatggtgttttaaaataacagaaaatacccagacactcttcaaaaaactgtgtttagtcagacaactaacaaacttagcaattagctccaccaaagtatagatgttactggagaatattaatgatcctaccacattaactatataaaactacactatcaacaaggaaataaaagctatgtataagccataaaataatgaataataatttactcttcttggttacccctataaaccagaaactgtgctaagagctttctgtgtagtagcagtagtttgttaaatcttgattaaaaaccatattaatcccattaaaaaaataaaaaacagaccaggtaaagtggctcacgcctgtaatcccagcactctgggaggctgaggtgggaggatcgcatgggcccagaagctggggatcagcctggggaagaaggtgagactttgcctctaagaaaaatataaaaactcagtggttgtgatggtatgtgcccatggtcccaactactcaggaggctgagaagggaggatcatttgagcccaagaggtcgaggctgcagtgaactatgatcacagcatggcattccagcctggacgacagagtgagaccctgtctcaaaaaaaattagaaaacaaaaaagcagctcagagaagttaagaaaattgctactcatagagtggcagagtcagaattattattatcattaaatcattagccgattctattactaatattgcttatgtttgtatttccagagttcagggcaaccacagacactagagagtatggggaagggcaaagaggaggaatcccagaaaggaaagagtcaaacaggggaagcctctgtattaaactctgcccaaaccctggcttgagccctaaaccaagcattcgtgtgacaaattccaatcagtacagctaaggctaaaagaattgaaccaagatttggaatattatccactctaggggtgatgagttaacagtctgaccccagtcaatttaagtgcctagtaaaataaaacaaaagaaacagaatcaatactctttggaggcatatagcagaatccagaggttctacaacatgtaacattcacaatatccaggttatactccaaaattactcaacatatgaagaaaatgagaaaacctgaactagctggaagaaaaaaaaaaatcaaaacagagtgactctgagaggactcaaatgctggaattacagacaaggactttaaagcaactattacaataatgcttatggatggaaaggaaaatatgccatgaatgagaaggagcctcagcaaagaaacattaatataaaaaggcaccagataaaaatttgagaactaaaacaattatctgaaattgaaaaattcactgagtgagtggacttaataaagaatgaaggtgacaaaataatgaccaaaaattccacaaatttggtgaaagacgtaaatttccaaaatcaaggatcttagtgaatgccaagaggataaatacatagaaaattgcatctaggtacattagagtcaaactgctagtaaccaaacatgatcatccggacagcagcagagaaaacaagtatcatacacatggagtcatggcttgagtgaccactgactcttgaccagaaacagtagaggcagaagacagtgaaaccacatctttttttttttttttttttttttttgagacggagtctcgctctgttgcccaggctggagtgcagtggcacgatctcagctcactgcaagctccgcctcccgggttcacgccattctcctgcctcagcctcccgagtagctgggactacaggcgcccgccaccacacccggctaatttttttgcatttttagtagagacgaaaccacatctttaaaggactgagagacaaaactagcaatctagaacttgacatccagtgaaaatatcctccaggaatctgacattgtccaattaaaaaaaaatgctaaaaatgtgtttctaacacaccctttttacacagccagccaatgtggactataagaaatattaaaagatgttctgtaggctgaagtggaatgataccatttggaaacctgtatcttcaaaaggaatcaagagcattagaaacagtaaatatttaaaaactattattcttcttaacttaaaaatgcatatgatagtttaaagcaaaaattaaaaccttgtgctgtggaatttataacatatatagaggttctatatattttaaactataacataaagcaggagcagtaaatggaactatgcagttgtcaggcttcaacattttacataaagtggtacaatattaactctaagtagactgtttctttctttctgttttttgtttatttttgtagagacagggtcttgctatgctgcccaggctacatttgaactcctgagatcctcctgcttcagcctcccaagtagctaggactacaggcgcgcaccaccagacctggtttctcttttttttttttttgagacagagttttgctcttgttgctcaggctggagtgcaatggtgtgatctcggctcaccgcaacctccacctcgcgggttcaagagattgtcctgcttcagcctcccgagtagctgagattacaggtatgcaccaccatgcccggctaattttgtatttttagtagagacggggtttctccacgttggtcaggttggtctcgaactcccagcctcaggtgatccacccacctcggcctcccaaagtgctgggattacaggcatgagccaccgcgcccagcccagacctggcttctaagtagactgtttctatctgtagagctagacctggaggtcctttaaacactgggaccatgtgatataatgcctggcacatagtacagacacttaataaacaccggtgtctatagaaatcactctaccaagactttgattaccaggattcaattcatgaaagcctatcagcccctgagaaagctgagaaaatccagctttcacaaaaccaaacctgagatgcagcacctagcctaaaaccacctgtaggtgtacccacaatgtgagtagaaggcagccaaagacattaactaatttgcttctgcttacaaaatgaggtatctcagtctcaaataaaaaaaggtcaaaaacgtaactgttcaagtaaaattaatgaattcgcacagtcaatataatgtacacgaattaatcaaaagtattcaatcatcttattaatgaatttagtagaacaaattttggtaattcatgttaagtatataaggaagggcagagagaggaaagatgtttaaaattcatcagaaataataagtctaaataacagggatttctgttttaagcaatggaattacaattttagtcctataaagaacaaagaaccaggctgtctagctgctaccaccctgggagagttctgcattaataggccattggtggccaatcacagccaacgagatcccgcctccattctctcactggttgtttctatactatcaggcacagctttgagcccagccagccatgctgcaagtgcacagcctggtcacctggccacagagtgcagacagcttgagacagcatatcttcaagtgtgacacactgaatgtcattaaatcacacagtgggacagttattctcttcttcattttccaattaaatcaaggaaattccctttgtccaggcatgtcttgaacacttccctaagactggtaatcttccttttaatacaaagcagatctcagctcagaatcttttgcaggcactgtgtctatatatatagaatttaatgttattttatttctgttttacattttggttaagtttcatttagagcaactgatgaaagttttctaaaatgtgtttaaataaaagaagttatttgatatgaagaaaaatccaggtggtattattaaaataaaaatagaaaaaagtggcacacaaatgactgatgtctaaaaaatactggattagcaaaatccaaggaaaatattcctactaataccatcatattcatatgtgaagaatagtacttttcattccaagtactgacaatcatttctttccccacatatgcaaacattttccctggtgtggatcaacagtctagacttcctcaaaattaggaaatcctacttgagtccaaattaataagattatcagtaagattattactatttacctgtgaatggtgtatttttttttttaagtaatccttcaatgcaccagcgcttcctaaaatatacatggaagcaagatttggctctcctttcctcaaagtgaatgaaaatgccagcattcgcttcaatgtcaattgtgaaggcattctaaccaggtaacgtgatgaataaccttttcccatgacgtttttatgtttttttctttattaaatcttaaaagacaaactaaatcaatcaacaactgatgaactatataaagataacagagcaggattcctcaacctcagcactattgacattccgggccagattatactttgttttgcgggctgtgtactgtggaaagtttagcaacatgcctggcctctacccacgacttgccagagcactccctccccaggttgtgacgatcaaaaccatctccagccatcgtctgatgtcccctgggggtggggggaagcaaggcaaaaatcaccccagttaagaaacactgtaaaagagaaagactggcccggcagtgttacttgcgggttgtccggtcagtggaaaagatctggccaacccttacttcttcgccttatctcccacttctctccttctctgcctccagccacaggccttgtggctatttcccagacgctcagtccctcggcagagggccttttcactggctgatccctctacaaagaattccttctcctcttaaaaatctttgctcattcatcatcctctcaatgaggtcttccctgaccaccttattttaaaattccaagtcccccatctatagcccccttatcctgatctactttcctgtttttccagagaaccccctgcctttgaacacacaaaacatttacttcctgggtttactgcttgtcagctgtgtccactcctcccactcctacccttagggtaagaatctttgattgactcattgatatgtctaggccacctcaagcattcaataaaagttgctgaatgaaagaatgcatgcatggtaaagatccaccaagctagtttgctgtgtcccttaacaatgagattagcacataaaatgatcctttctctcaaaaagaatgttctagaggccagtgtggtggctcatgcctataatctcagcactttagaaggccaaggtagaaggatgcttgagaccagcctggacgatgtaagaagaccccatctcaacaaaaagtagaaaaaattagcagggcatgttggtgtgcacttgtagtctcagctagcggggaggctaagattggaggatcacctgagcctggaaggtcaaggctgcagtgagctatgactgtgccactgcactccagccttggagatagggtaagaccctctctcaaaaaaataataattttctagaatttacatttctaaggacaggtgcggtggctcacacctgtaatcccagcactttggtaggccgaggcaggtggattacttgaggtcaggagttcgagaccagcctggccaacatggtgaaacctcgtctctactaaaaatacaaattagccagatatggtggtacacgcttgtaatgccagctactcaggaggctgaggcaggagaattgcttgaaccaagatcatgccactgcactccagcctgggcaacagaacaagatcctctcaaaaaaaaaaaaaaaagaattaacatttctagccattgctaagttggcatgtcgtctggcaaatgctgatagaaacaaggggctacggtctacaaggcagtattacaaacaattactctgggacccaacaagtccagaccacacataaagatcaggaatcttaagctttcaagttagaaatgaaatatgaagtagcacataaataattcctagttcaaatttcacttttgtttacatttgaaaaacaaaaaagctactaactccatttatgaaagcttcgcatgatgcagaaaaacaaagctttctgaacaaaacagtttctaataataacttcaagttgtcttggcccagtgtaaaatatgaaataaaccagtattgatcatgttttgacttcatttgtcatctacactataataagcttttaagcagcagctgttttctgtttctgccactttctaaatttctaggtttactgacaagttgacacaggacactactgactgtaacaaaaatgattaatatataagctagcaatgcacagtaggaaaagggcttggagaagggccatggtgatgcacaggggtcagtggcctctcctaccgtcccgtatgctcagcccccatcccctggctctgcacacacgagccaccttgaactgtgtgtccaacacccctgcagctctgttacaccgcagtcagcagctgtgactgctcctggccctccagggagatatacagtttaaaaatccactttaatagctaagacatagacagctcacctctaccatccaaaccacttcaaacgctaggaaatagacagcttacctctaccatccacttcaatagctaagacacagacagctcacctctacagatagcctcagctatcagggaggctgaggtgggaggatcgcttgagcctgggaggtcgaggctgcagtgagctgattgtgccactgctttccagcctgggagacagagtgagaccctgtctcaaaagtaataataataattgtctagaatttacatttctagccactgctaagttggccagggtggttctgagctcgcacaacctaaaacaagatcagttcctcttcaggaaggtcctgaccactttgcaaagaataacagggtttatcccttgcccctgatgctaggtgactacatttaaaaaaaaaaaaaaagaaactcttctccgactaagaggcccaccagagaaaaatatttctggaaactacaacattgagaaaaaaggatttaccctcctctatgttaactagttactcaagggttatcaaaccctgacagtatctctatcacttaacgtatgttggggcataaaggaaatcagatgaggatgctgtagtgaaacacaccatggactcctgagtcctcacctgtgtgtcaatgtttttcaccagacacccatctgtcctaaagcaggccacgtatgaattaatatgttaagcataacattaggtgaatgtgcattgcaggttcaactatagcagatacaatctaataaacagaaaagaaactttacaggtcattttacagcaaaaaaaaaaaaaaggattggaagatcaatacagaaacagaaagcatgctgacagcagactgaccttgaacatcccctcctccctcatggacagcaggcaacaacagcaaacctaattcaacagagtagtggtccctgggcaccataagccccacgggaaaaaagatcatcatgtacatcaccacccacaatgccatggtggcaagcaccatgggacacaagcacagacaaacaggagggacacagctccacttggaagagagtgaagagatggcagacaccttccctagaacacaggtggtatgtgatttgggccttaaaggttgaacagaaatcctccacgtgggaagagagtgagaatctgggaaagggaaaaagaacattccagatgaaggggcaagcacagcaaggtacactatctgccaccttcaagtggttcagggacactgagccatttcacacaaagccaccaagccctgagtagccacaccataatcagctttaagtggaaaaaggggaaaaaaataaacacaataaaacatacctaatgagatccctttattggcccaaacataagcagagcaggagctggaggtagaatgttatggcgtgtctaccccaggcaagcattttcactctccagccattcccagtatttatgattctccattcaacatgtcaccctatcattataactctacatgatatatgccaccctgagccagaccaattatccatacaatccaatattctgtttctgacataccactaggggacactgaacaaggaacatgatagacatggtccactatgtccacgtttgactcaaaatattacaagattggttgatggtggccaagaagtttaagccttatttgcaaaatttgtacttagaatgtagaatgtattcatgtagaacttatatcaataaaaattaattttttagagggtcacattagccactcttcaataaacaactaaatctttgcaaggccttaggtgatttggggggaactagaatacaccactcccgtaatgtgttatttaaagtagttttgttcttctcactaacaggcttgtaagtactaatgcagattcctgaattgggactatttctaatagcgagactagacaagcttgatccatctaacaaataaagaacattcttgattcttcaacagcttttggtgggaagtgacccccgcacacctcaggtccttgttaacttaactaaattcaaacggcaagttgtgcaagcaaactttctctatataaacgtcattctctaacaagacccacactgatttattagctctcatatgagcagatccatccaatgcataatgttttatattgcaaatctttgagggctactgatagttattactagcactatgcaatgggctggctggaaagaccagcctaattcatgagcagccatcctttctatgccatgcagacatggaaattcctctttgatttgtggctttaatcatggcttccaaaacccatcattatttatgactcttttatttacttttattttgagatggagtttcactcttgttgcccaggctggagtgcaatggcgtgatcttggctcactgcaacctccacctcccaggttcaagcgactctcctgcctcagcctcctgagtagctgggattacaggcatgtgccagcatgcccggctaatttttttttttttttttttttttttgtaattttagtagagacagggtttaaccatgttggccaggctggtcacaaactcctgacctcaggtgaaccacctgccttggcctcccaaagtgctggaattacaggcgtgagccaccatgccccgccgactctgacttttaagttgacagtcaatgggaaacaggttacctgataggaaagaactctgcagctcaaagcagttcatatgctccattttaatgttaccaatctccattctcctgccaactcgcccacttgagggagggagttgaagaagatgagggtggtaaagtctacacggcgttaatgaatgaatgaatggaacaatattacttaaaaatgcaatgagttctctagtcagacttgaggtagatgcaaaagaaaaaaatggttgtagaagacagtcaaaatctttgggatgagtattggggtatagggtcctctattttcgtactgttcaaaatagctaaaacaatcaagcaatgctctcagaccaagcaaggtaactttaccagcatctccaaaaccacctcttgctccattccacttaccacctcccgcaatgggtaacaactctcctgccttctgacagcctagattcgctttgcatcgttttatagtttgtacaaatagaaccatgtagtgtgtacccttttgtgtctggcttttcagatgtttgtgaaattatccatattactgattagagctatagatcattcattcttacagctgcatggttttccattgtgtgaacataccagaatttataatcctttgtagtcatgataaatatttgagtagattgcagtttccaactcttaagaatcatgcaactggcccggcacggtggctcacgcctgaaatcccagcactttgggaggccgaggcaggcagatcatgaggtcaagagatcgagaccatcctggccaacatggaaaccccgactgtactaaaagtacaaaaattagctggacctggtggcgcgcctgtagtcccagctactcaggaggctgaggcaggagaatcgcttaaacccaggaggcagaggttgcagtgagccaagatcacgccactgcactccagcctggagacaaagcaagactccaactcaaaaaaagagaatcatgcgactatgaacatgttttttgagaatatatgtctatgttttgttgggcatataaccaggagaattggtgggttattcaaattctttttttaaggttttcagagtacatataaatcatgcaaatctgtgctggaatcttccatccctgacgaaaagcctcttgaagccctccagctgcttcttgaaaggctgtgctttctcctgctgggctgtgagtcccaaacgcagtgaccattcctcaaagtgcccagtgcctagccacagcctgctgtattcttcgccttggctaccaggcatgggacactttgaccactgagctactggattccagaccacactgcctcaacttccaaaaccttctcaattaactccaatctggcttccacttcttggctgtgctgaactactcactgaggtgagtgaagacgccctaactgccaaactccatggcctgtcttcaatcctcatcttacctgacccttccggggcaagtgacataaataaatgattatccaatcaaaaccctggctccaagggtctcctggtttcttaactccatggctaatttctagaagcctctgctgcccagggtgtaccccttcgccttcttctccaacattccctctcatcctgctccctctcatcctgctccagctaccactcaccactaatgactttcacatctcctctccagtcctaactgtgctccagaaccctacaagggggctttctggtgtcctcaacaatgccaccaggatctgtgtcattgcttctcatgtgctgtccagtgccattcactatgttagaccacagggacccaaagaaggataagacccattctaatggtcaatgctattagtaaattagcaaatgctgccacaggaaaatacagggctcaggaaacacaaagaaggagtgtctagcccagtctgggtagaagggaatggaggtgtcagaaaagttctccacgagaccctgtctctgagttgacccttccctcaccactggaactatctgtcaaccctattccccactcccgggctcatctccttgattgagaccccactcccctcgcctgaaccacgggaacacactggggaccccaccccagcttttcctccaccagtctttcctttctttaaagcacagagcagctctagtcactccctggttcagattctccagtggttcccatgactccatggataaaaggccaacactttaccttacaatggacttaagggctatgtatggcctggcccccacctcctcctctcacctcctgtgtctgttattcactgttccagacacacaggccttcctgctagtccttgacaaggaagagctgtatgcaggaggctttctctggctcttcatgcgagtatctccagcgtgttactcaaatctcaactcagaagcacctctcagggctccagagatgccttctctggccacttgacgttagcagcacctgtatgcatgcaaccacactgtgctggcaccttcagtcacactcacctgctatatgtccttctgcttacctctttagtgtcttgtttctgctgctgaactgaaagcttcatataagcaaaaactgggttcgttttattcacttctgtgtccacaatgcctaacatagtgcctgagacttaataggcccttaataaatatcagttgaatgaatgaatgaatataacagtgaatgacgagtcctccaaaggatagtggttaagataaattctgcagcctgacttcctggtttaaattccacccgtcacttactagctgtgttactttgggcaagttacttagcctttctgtgcccgctgtgagacttgcaataataaaatgggattaaaaacacccagcccgtgggcttttgttacaacaataatgtgtcacagcagagcttgacatgctcttagtcctaagtaagcagcagtgtttgtaccactgcttgggttgcattcctaagacagaaacccgaccacagtgcttagggacgccctactgcctcccaggttaagcctaaaccctggactggtaaagcagattcttcactgacagcccccagtgctatctcccagcctctcccactccctccctcacacacagcccttgttcccaagtctccactcttctttctcactggctcccaagcagaccaggatcatgcaacactctgcctgtgtacacaccgcccaaatgcccatcgccttcctccgcctgccccaactcaaatgccacctcccctcagaagccttcccctcctacccctgccctgtcttctttttttttttttttttttgaaacagagtcttgctctgttgcccaggctggagtgcagtggcacaatcttggctcactgcagcctccatctcccagtttcaagcaatcttcccacctcagcctccctagtagctgggattacaagtgcacgccaccacacttggctaatttttgtatttttagtggagacggggtttcaccatgttggccaggctagtctcaaactcttgaccccaggtgatctgcccaccttggcctcccaaggtgctgagattacaggcgtgagccaccgcacccagcccggccctgtcttcttacaggcccagatctgtgttccctcttctgcctgggcccttgagacactgcaggcacttccctgccaggctgtgggtgtcaggagttgagccccaggcttccccacaactctatccccaacgcttttgggaaggctgataccttggaagacgtggagaaacacgttatgtgcatgaatgactttccaagcatggaaactaatacctgccctcacctcttatttttttcccatcagggttaaactatttggtattttcaaggtcaaaactactttcccttttgttagctaggttttgttgcaaaatttgtttacaagagcttattttgtgatgaagaaagccatttaaaactcttctttttaaacagagacaacttgtgggaattgctgatgttcatctgtttgcctcacaggaaatagaaaatacagagcaactaaagtagaatgcattacaacaacgggaagggaagcaaggtggatccgcttccaccactctgactcttttgttccttgccattctcacacacaaatgggaaaaatgagacatgaagcttgagcagcttctcaagggttattcaacagaggtttttcaacaaagctcagctcttctaactaaacctagtgggaaagatactgatccggctggctcaactaatccacagacctaggggctctaatggaataaaatcaactctgagctagagaaggagtcagcaaaccaccttccctaggccaaattcagcccaccacttgtatttgtaaataaagttttattaggacacacccatgcctactcatttatgtgctatttatggctgctttcaggctacaatagcagaccagagaccttctagccagcaagccctaaaatatatgatcctttccagaaaaaaactgccaatctctgactcagagaatactttgatctctgggttttgttccattttccaagtattagatattgctgttcaaattatttcagttgacagggagatttttattttaaaaaactgaaaatctttggttcaagtatatatcatagttcagagaaaaagttcaatggtttggtttaggattgattcaagcgtatatcatagttcagagagaaagttcaatggtttggtttaggactcagattaatatcgttcctctgctttgggggcttggttgttgtccttgaggagatttttacaaacatagaacaaagtgggcagataacatggaatgctttttgctctggaaaatgtcttttattccaggttgaacatatattgctccttctagcattaagattccaagattttctctatattccattggcttagctaatcccgttttcaccaaaggtccagatatcatttgttagaacctggcttttcccataaatagaagtatatcgtcttccaagctctttcacagatagctcttgcaagctaaatatttgaaaagaaatacactgccccccaaacactaacgtattttatgagtcagtcttttgaagctaaatggatcttacaagaactccgcagtgacttcagaattggaatccagccttccaactcttcctatagatgtttgatcatgtgacactttcatctcactcctttaaaccttttactatggaaattttcaaacatatacaaaaatagagactagtccccagtaaccaacttcaacaagtatcaacattctgccatttatctttccatctatccctctcctgaccttttatttactgtttgttgcagtatttgacagcggacttcacacatcaaatgatttcacccacgaatgcttgtttctgttagatgaggcccttttcctttgaacaaaaccatgacactattatcacacccaacaaaataattattaatattatctaatacccagtccaactcaattttccctgtctcaataatgtatttttatagttgatttgttcaactaaagatccaaatatgaccacatattgtcttatgttgataggtctcttaggtctctttacatttgcaataggctcccctcattttttattcaccagctctctttacatttgcaataggcgcccctcattttttactcacccatccctgacacacatttaaattctaattggccaagcaaaccttatcaacaataacacctcttcagcctccatatgctataagcaaaactagacattcataggcctgcagctgcttaggcatagacatacagctccaccttccatgtgtaattcaacatggaaaccaatatgtcaggccatcccacacactttccgctttcaagagaagaaatttagattgcttcagcaagccaattctctgaaatgaaatctcttctgtgctgcaatggcctgaagactctgaatgatttaaaaaataagacatccattcattatggctcccttttgaaattagccaaacataatcaagaatcacaaagtaaatcagacaaaagcctcataattcgttatcgttaacattaacaacattaattgagcacctagataatgcgagacattggattatagaaaggatggcctgtgtccctaccccaagggacctacagtctaaataggcatcgcatcatttagacacaaatgccccaggaggacaacagtcacagtaccacccaaactgacatccatctcctatcccctaggttaagaatatttatgagattgatccatgtggtggaataaaaagaaaagagcagaccaggcgcggtggctcacacctgtaatcccagcactttgggaggccgaggcgggcagatcacgaggtcaggagatcgagaccatcctggccaacatggtgaaacgccgtctctactaaaaatacaaaaaattagtcaggcgtgttggcgggcgcctgtagtcccagctactcgggaggctgaggcaggagtatggcgtgaacccaggtggcggagcttgcagtgagccaagatcacgccactgcactccagcctgggcgacagagtgagattctgtctcaaaaaaagaagaaaagagcagaaggaaccgcatttgactgtgaattccaccattcatgagctgtgccacaatggataagttactcaacctgattctcagttttctcatctgttaagaggaataatcccacctacctcacagagtagcagctgttaacattgaatcataagctcttacataaaaatccagcaaagatgatgatgatgataaaatcactgaatactttacaaagcactagactagaatgttttctggctatccatctaaccctcacaccagtcctatgaagcagctcccattctcatgccattttccaaagaattgaacagaatggatgagtggtccacccaacgtaacacagctacaggtgtgagagagccaggatgtagaggataaaacttcagggttctttctgccaataatggtatgataatacctcccaatactaccatggggaggtgtaggggtagaagcagggcgacacgaatgagcatgccctcccgtacagatcaattatgttataaactcctaaggtacagcactccacagctcctacccttgcccaaacaggaagcccccaagaggctgccaaggttgtcctacccaaggtgtggttaagttcagagccataacggtggtttccttcctcattggggcaagtcttcagctgtctgctgaagagtacttaagtctttataatcacaagtctcaaacacctaacatttgttcaaatatttgtccaaagtaagatcataattttttcctatataattccttacttccttttttgtacatacataggtgaaaaaggactgaaggaggggagccgtcagaaaagaggtgcaactaccctgtggccactatactgtgagaaggctgacctagccaagtggaaagggcacctcgcggagaactgaagtcctggccaacagccaggacctatgccacccacataagtgacatcatttcggacttccccaactgaaaccacattaagcagaagcaccacccagtctactcacagatttgtgggaaatcaaatgctgttggtttaagccattgagttttggggtggttagataactgaagcagctagaaaatagctttccagtcagaccaaataccacatctatgaatgacaagcaccatcatggcaactaaacattgtttatccgttgtatcaacggaaatgatacaactccttcaatctgagcatgcccatcggctgaaacattcagctgggtaaacctggatctatactgtaccaggctcaacagtgttaaataactactaataatgatcacatgaataacggtaacagcagccattatttaccaactgtttattacatactaggcattgtgctaaatcctttattcatttaatcccttataaaagccttttgaggtgggccactataatgcccattttactgatgaggtcgctgaggcatagagtggtacagcgacttgcctgggatcacactgacagtaaacagtgatacgggatttcactcttggccatctgattccacagacaccgggctcttaactatcagcttgctttaccccttcaaaagtgttatgctactttaacaaaactgccccttgttggtttgttttgttttgttttgtttttttgagacggagtcactctgtcgcccaggctggagtgcagtggcgttcactgcaacctctgcctcccaggttcaagcaattctcctgcctcagcctcccgggcagctaagattagagacgcgcgccaccaagcccggctaatttttgtatttttagtagagacagggtttcaccatgttggccaggctggactcaagtgatctgcccgtctctgcctcccaaagtgcggggattacaggcctgagccaccgcacccagccgaaactgcgccttctgagttaatgtgtgtaaagagtttaagactgggccgggcgtggtggctcacgccagtaatcccaacactttgggaggccgaggtgggcggatcacgaggtcaggagatcgagaccatcctggctaacagagtgaaaccccttctctactaaaaatacaaaaaattagccgggagtggtggcgggcgcctatagtcccagctacttgggaggctgaggcaggaaaatggcgtgaacccaggaggtggagcttgcagtgagccgagatcgtgccactgtactccagcctgggctacagagcaagactacgtctcaaaaaaaaaaaaaaaaaaaaaagagtttaacgctgtctggtccatggtaagttttcagtaaacaccaactcttactattaggaaacctgaagatgtggaatgaaagatgagaggaagtactgtatatgactggcgtacagtacgcccccaattaatgttagctatttggatgatttatatagggcttcttcaccagcaagcactccggtgctcggtaattttctgtttacaagtaggctctccccacaccctgtgagctccctgcgtgtagagctgttttcaacacatccttgcaggttcggagcccaacacgtggcccccagagcaaatagctgctcagtaagtttcttgacaggagagaaaacgcttccttccttcaccagaaatgcgaacttggatttctaagatgacacctcccccagctaccagcccttaacatgattccaaaaaagagggcaagaagggacaagggtcccacccaagaaatgcgggggccaatgggctccatgggataagagatggagccgggcttgtggccaggacacttgagaagtccgtgcaactccgtgaccggccacaccgagagggggacctcccaaaccccccagcagtcctaaaaagtccctaggaaaagggcaaggccctgagagggaagtcacccacctcccaggtggcggaccccccgcccgcccagggtcgactaggacttgggactaccccctccgcccatcccacggcagctgcaggcgcaggaagaaaagaagtgacagggagtccaaagtttccccaacaacaaaaatccttcccccgagggaagggaagggctcccaccctcagcccgccccgcccagggaggagggaccgccaccagtggatctaggcagttgggggtcccgctgttctggtcccgacaaggagtgcctggcttgaggttcccccgccccgcgcttcgtgcactctgaattctttgagagggtcccagggagggacaggggtgccccaactcttacttacagtcgtctaagtcatcctgcaagtccacaaagtacagggggatctctgaaaaccaagaaacacacaagaagttaccagggggctgcggcgagaggggacggggtcgggcaggggcccctcggcctcgcggggtggtcacggggcgagagagagaggggcacccctggcatcccccgagcccagccccactcacccgccatcttgggatgggcatggaggcgggaccggcaggggcggggccctgcagacaggggcggggccctgcagacaggggcggggccctgcagacaggggcggggccctgcagacaggggcggggccctgcagacaggggcggggccctgcagacaggggcggggccctgcagacaggggcggggccctgcagacaggggcggggccgtcggcttcgggccccgcccccgatccgcgccggccggccggccccgccctctcagcgaaggtggctgccgaggtgggcggggaggtcaggtgacgcggccggcgtcccaagatggcggcggcggcggctcccggaaggccgcggcggcgtcccggctgctaaggcgggccccacgcggctggcagcggacaggccggacctacggccggaggacgggcggcagccgcctctgcgcggaccggggctgggccgtgcggcggcagcggcgccaggggatgctcttgctgggcctggcctctcccttctcaacttagggcggcggcgggcccgcgcccctggctcccgggccatggcgctgagggagctcaaagtgtgtctgctcggggtgagtggcggcgggtccggccgggagggccacgggaggctgggctggcggggaccccggatcccccctgtcccctcatcccttcccccctcccacgtccaagacgctgtctgccagccccgtggaccctccctccagctcgggagccgtcccgcccacctcttgcactctcgaaaaggtcctggaggccgaagggacccttccccttcccctccctggagcccgtggactcttcccgccccacaaagagcaaacagcccccccttgcctctctattgcatctgggttaagagaggttcttaaatagttttctcccaacttaccaaggtattagttgggagttggccaagtcttccaaagtaaaaccaataacaggtctttaggttttacaagcagcattagcctactttgtctcttgggtgtttttgaacttgtgggatacccctgccacttgtccaaagagttactttgccaagtaactcttcctgtggagaaaaggggtgttcaaatcaggaagccccaaagactagtttgaagcttcagcttcctgtcttgtcaggaaagacaaggtgttggccatttcaaagccttctttctgaaattgatgctgtcattccagagtttctgccttaaagatcggcaggaactccaataactaatctttattcccccaaatagggtggggctaggattcatcagggattactcagaggtaactcaggagttcaaagtttactaacatatgttaaaaagcaagtggacttgttactttttacacgaagcagaaactttgggtctctcaaaaggtcctaatctgtcttaacggcaaaaacctctcccttttagtacagttggaatttcctaattactctactgaatttttatgacaaccgcttttgtgttcctccgtttataaaatttacacgtctagggtgatttttctaaaatcctgaacttatgccacaaagtagtttttggtgtctgccaaaaggtaaactttttctcagtccctcatctcgttctctttcaggatacaggtgtaggtaaatcgagtattgtgtggcggtttgtggaagacagttttgatccaaacatcaacccaacaatagggtaagagacttttatttgatacacatctaaaggtgcattgaaaatccttccaaatacatagtgtgttacaggtgtaggccctgcgctttgtagtcattgaattctgagtcgctggttcgcatcatctctggaaggacttgaaagagtccagtgaggatctgtgtattttaggaaaattatcttcggacttgttgggggtgagaacttcaaaatgcaaatatgaattggagttctactaattattagaacagacacagaagcttcggtctataaatatcaacagcaattacaccttgaaataaggcagatgaaaatagatcctggtgctattctttcaggcatatcaagtaaaagacatttaaatggtttttgtccttcctgaaagtagtaggttgagatctgaacccttacacattcctgtactggtagtaataataaattaataaattcatattgaaatggaaggttttttcagttctctggttctatggataagtaaagttgattgttcatatgtttttgacgctataagaaaacttttcattttgcaatactaatcctttgactacataagaagttgtgttttataggctttaatattatgttaaccttataaaactaaataggtgctgtgctctagttttaatcatcaaaccctcaaatggtttccagcatttaaagaaaaaatctatgttatccatcattaggataaaattggcctttgtgctccatgcagatcattctttgactaatagagaaatattttacagcccaggagagaaactgccataagattgtcccctgagaaattatgagctcctgctgtcagaggttatttatggatttttttgagacagagtttcgctctttttgcccaggctgcggtgcaatggcgcaatcttggctcactgcaacctctgcctcccgggttcaagcgattctcctgcctcagcctcctgagtagctggaattatgggcgcccaccaccatgcccagctaattttgtatttttagtagagacaaggtctcaccgtgtttgccatgctggtctcgaactcctaacctcaggtgatctgcccacctcaacctctcaaagtgctggggttacaggcatgagctgccacacctcgcctatgtgttcaatattttttgtctgctttttttttttttttttcacccaggctggagtgcagtggcacaatcatggctcactgcagcctcaatctcctgggctcaagtcatccttccacctcaggtagctgagatcacagatgcacactatcacacctggctaaattttgtattttttagtagagatagagttgcaccatgttactccggctggttttcttttttttttttttttttttttttttttttttttgaggtggagtctcgctctgttgcccaggctggagtgcagtggcgcgatcttggctcactgcaagctccgcctcctggattcacgccattctcctgcctcagcctcccgagtagctgggactacaggcacccaccaccatgcctggctaatttttttttgtatttttagtagagacggggtttcatgtattagccaggatggtctctctctcctgacctcgtgatccgcctgccttggcctcccaaagtgctgagattacaggcgtgagccaccgtgcctggccgcctatctgcttttttaaaccctgtgggtctcctacacatttgaaggcatggggatgaaattcaccaataagtttctgcaattaaaatgcttttccgtgtcctttaagaaagagctgggtatgacacatgtaaaacatgaccccatccttctcagggcctgcctgtccctacctgcatgggaaagtgaagtgttgggaagtgacagcaagtactgctggtgattcagtgagtgatacacttcacactgagtcagagctgaaaacctaaaatccacaagacacccagacaccaccttggctagaagtgctctctcaaataagaagagagaaaagtgaagggtgtagcttcatgcatcttggtgaggcacgccccatcctgagtgtccactgttccctttttgccagtagctcccaatctgccagatgcctgtggctcctgagctgcctctagtccactctctgcaccaggagatttggctcacattttcacagggaaaatagcatacaaggctttctcctcattttctttcttctgcctttttttgtttctttttcctcagttttagaaggtggcttcctcctttgtgaccaaccccaaacatgcccctgagctctggagccccacctcttcatgagttaccctgtttcttcctcagccctatcatcttgtcatagcctgcacacaggttccgaatccaccccactccaccacaagagcacccattccccaacctactgctcagatggtggaactcctgaaagagaagttaccacttccgcaactgctgctcactcttcagccctccgtcatctcagctcctccctgccatgccactaaaaccaccttcccctggtaccagtttccatctaatagccaaagtcaaatggccttttcttggtagttttctttattcatagagtgcctgctatatgccaggtgctagactgggtgctggtgcctagaccaggggtgggcaaactgtggcctttttgcccgcctcctgcttttgtaaataaagagttactgaaacagtcacacccaattatttacttactgtcttgctgctttggggctacaatgaccaacttgaatagttgcaactaagccttgatgggccacaaacccaaaaatatttgctatctggtacttttcagagcaagtttgctgaccccgatctagacaaaatggacttctgtcctcgtagaccttacctacaagaagctacattatgactagtgtacaggaaatgatttattctttttctttttttttttttgagactgagtctctctctattacccaggctggattgtaatgacacgatctcggctcactgcaacctctgcctcccatgttgaagcgattctcctgcctcagcctcccatatagttgggactataggcgcacatttgggaatctgcccgccacaatgccaagctaatttttgtattttgagtagagacagggtttcaccatgttggccaggctgttctcaaacacctgacctcaggtaatctgcctgccttggcctcccaaaatgctgggattacaggcatgagccactgcgaccagccagaaatgatttattcaacccttttctgtgctatgaaggagaaatatgcagtactatgaaaacatgtgacagggacctgacctgggcctgtggggataactgactcctacagtgatcagtaaaggtgtgaagcacctagcagcactgacatttaaatattgaaagatgaatggattaagtttaagaatcaaagttggctgtgcacggtggctcacacctgtaatcccagcactttcggaggccaagacgggtggatcacctgaggtcaggagtttgagaccagcctgggcaacatggtgaaaccccgtctctactaaaaatacaaaaattagccagatgtgatggcacacacctgtaatcgcagctacttgggaggctgagacaggagaattgcttaaacgcgggaggcggagtttgcagtgagccgagatcgcaccactgcactccagcctgggtgacagagcaagactccatctcaaaaaaaaaagaaaagaaaaaaaagtttttgaagaatggaagtgaagtagttggtggtggtgagggacggtgggtagaaaagaaccagaatgggcatgagggacagcaaggaccgtgaggcgggagggcaagggaggttggaagaggggtcaggaggccggggtggctggaggacccacagcaagaaccaggagagacggcagggtggttggtgagccagcagggaccagtccacagggccctggagtccggaggaggagccgacatcacttactgcagaacacatccctgcttctcagttgaagctcctctgtcttctctagttcccttcctgcttcataaccgtgctttctcactgcagtctcctggcctctcatactgatttgataaaagctggtcttccccaagctgtgtcctgacttcccatgtttctcacctccctcggacacctcaccttcacctgtataatgtgacctccaagcccatgcctccaacccatgatttgcacctagtctcctacagaactccgtctttgttcctcctccagtcctgcatacctcacacggtatctgtgttcttccctaagggctcgcctgtgtcgtatcatggggaagagcatgggccttgaagaaccatgctccctagacttagggccttgactgtgtgctagcagggagaatatctgcgcaagtgacagggtcactcttgtggaggttggggcggggggtcatagccctgcctaccttatagggagttttaggagaattccgtgactccatacacagagtgggcataggaagtgtgcagtaaatggtggtggtgtgtagtggtactgtcatcatatccctcttcaccccacccccagcccaatccccaaaccccattcatatccatttaagaaagggccctctgggactccttcccatcctcacatctgagccctcatcctatcttgccggggctattgagctgatttcagaaccagttattctgtggcctggctctgccacttggagtcagttctcctcattgttgctgtgtgagcttcattaaagacaagtttgatcccctcagtgaaaaccacggcagaggaacccttccctagcccgggcccagcctcatctctcctgtgcttcctccatgtttttgttgctcacttcctccccagcacacaccaagcagcacccgttccacacctgggtttttggcacatgctattctctctcagggccctttcttttccttgtctccttggcaaattcctgattgtctgtgcaaactcaggtacatgttagtggctctaaaagttgcagactccagggtcagcaaaggccaggcaaagaatgtaaatgggagatggaccaggtagaaacactggagggaggctctcaggcatgaactgcccagaattcctgccctccctgcaccaggtcccctcgttcatcttcttacctccagggacactttgcttcggtctccttcggccttgtcatccctttgtatgtccagatcccagggttctgaggtagactcctgcccatttgcattttgtctcctcttgcttgatgtcatgtaactccagttgcaaccacagcagggattttcaaagctgaggctttttttcagacatgcatgtctctggtccctcttccaggattccaggaacccccttcctctacactacacatacgctgtaagaagaggaggcccccattaaaatcaccaccgtagtgagccattgtgtagtgagcctattgtgttcctcaagtgtgctagagtagaagattggctccctgcacgtgggtgagtcctactgcagcagcaccaaattccctcttaagctctagacctgcagattctgctcaccatagagcctgtgcccacaggtggcccatagacacctagggactgtccatgtatgtcactgagctcgtgaactctctctcagaggcttggatctctcctcctctttccatggaccttggggtagaggaaaggaccaactgtcctcaggtactcaagccagcaacctcagcatccttctcaaatccctcctaactcaccatctcctcccctcagccagtggtaagtcactcgctcctgtccaagccacctcccaaatatccctccttctctattgctgttatatgacttctagggcttcatcttccttcatggagatgagacatggactctagactttgattagatcacagctctgccacttgctagctagttaaccctgggcagtttattttatgtatttattttttgagatggagttttgctcttgtcgcccaggctggagtgcagtggcgcaatctcggctcactgcaacctccgcctcccaggttcaagtgattctcctgtttcgacctcccgagtagctgggattacaggcacccaccaccacgtccagctaatttttgtattattagttgagatggggtttcaccatgttagccaggctggtctcaaactccttaccttaggtgatccacccaccttggcctcccaaagtgctgggattgcaggcatgagccgccgtgcctggccaaccctgggcagtttagtctctgatctgtttcttcataagcaagtaaggataatgataggaccagctccatattgttaggagaattccaagagaggtgtatttaaaatgcttaggaaagtaccatggatactagaactcaataaatggtagttattattcttttttttttttttttttttgagacagagtctcgctctgtcgcccaggctggagtgcagtggcgcgatctcggctcactgcaagctccgcctcccgggttcatgccattctcctgcctcagcctcccgagtagctgggactacaggcacccgccaccacgcccagctaattttttgtatttttagtagagacggggtttcaccatggtcttgatctcctgacctcgtgatccgcctgccttggcctcccaaagtgctgggattacaggcgtgaaccaccacgcctggcctattattcttttttaattttttatttctattttttagagacagggtcttgttctgtcacccaggctgagggacactttgagctcagtgcagcatcaaactcctaagctcaagcgatcttcttggctcagcctcctgagtagctaggacaacaatagcacgagcagtacgcatcaccatgccttgctaattctttttatttcttgtagagatgaggtctcactgcattgcccaggctggtctcgaactcttcacctcaagtgatcctcctgccttggcctcccaaagtgctaggattaggcatgagccacagcattttgcctattcttttgtaaatgtttaaatctttttaaaattttaaaattatttgtatcaaagcaatgtgtatatggtttttaaaacctgaaatagtgttacgaggctaagtgttgtataacagtgccctactctgagccattccctggaggcttactgttgccttcacatttagctattctttctaattttttctccaaattttttcgtaacatgcatgcacaggttgagtatcccaaatacaaaatgctccaaaatctaaaactttttgagcaacagtatgacactcacaggaaatgcccattggagtattttggatttttggatttgaaatgctgaactgatataatgcaaatattccaaattctgaaaaattcctaaatcagaaacccttctttttttttttccaaaatcggaaacacttctggtcagcatttcagataaggggtactcagcatgtactggtagttgttgatccctctctcctccccgcctcctgtttaaggcagtatctactgattctttttctttggaagatgggaattttgccatcctcctcctcccacctccttgtgcacatttgccctccctccatctttccattaaagttctctcattgggagtcaatgtgccatagtgttcagagccaggctgtctgccttcacctcccagctctagcacttagttgctctgtggcattggacaagttatttaacttttttgtgcctacatttgcacatttgggaatcctccttggcatctaatctgtagggttgttgtgaaattgaattcaaacacataaaaattgcttagaatggtgtatgtcgtatggaaagcatttgttatttcttagcaaatgacaaaattaaattttaaaaggttattttttaatctcccactatggttttgaactttatataaatggaattagtatacacacacacatacatgtcatttgtttctaggatgattagactgacatatggaaaaaaaaaagattcttgacccttacctcacaaagtaaacgagtagaaacagatcacagaccaaaatttaataaggctataaaagttctagaacaacattggacatataggacacaccaaaaaacaaagcataaaaagaagctggagttgatcaaaattaaacatttttgttgaattcagcatttgttgaattaaatcaccttggcacctatgagtttatatatgtgtatgggtgtatttctggatttccttttctgtcccattggtctattcatctgtcctcaagccagtacaatattgtgttcattgctgtagatgtatagaaagtcttggaatcagatagtgtatgtcatctaattctattcttgtttttcatgtctggctcctctgggtcttttgcatttctatataaattttagaatcacagtgcccagttcctcaaaagagccaggtgagatcttgattgggaacacattgaatctcttgaccaatttgggaagaattgtcatcttaacactattccatttttgatccaggaacatgatatattcaccgttaatgtaggtcttttaccattcattcagtcttttaccattcaatttgatggctgtctctaggtcttttataaatgccattatcaggttgaagatgttcccttctattcctgaattaatgagattttttgtcatgaattgtgttgaattttattagatggtattttacatattttgagctgttcatattctttttctttctgttaaaatggtgcattacaaccattgagagtttaatactgaaatattaaaccaatctggcactcctaagataaatttctcttggtcattatgcattattattttttatatattgctggatttgatttactaaaattttttcaaggatttttctctccatgtagttttctgtaatagtctttctctagttctggtgtcaggacctcatcaaatgagttgaggaatgtcttctcttctacttttttggaagagtttgtgtagaattggtattacgtcttccttaaagttttggtagaattcacagatgaaaccatctgagcagggagttttctttgtctgaaaatatgtaactgcagattcaattcctttagtaaatactgtaaaggcttattcaggcaactatttcttcttgagtaagttggtagttgtgtccttcaaggaatttgttcatcgtatctctgttttttttaatttattggcataaagttgtttataatatccacttcttatccttttaatgttttgggatctgtagcaataccccccttccatttttgatagtgctgatttgagccttctcacttctttttctgaactgtccagctataagtttatcaattttattcgtcttctcaaagaaccagtttttgttatctgagcatttagaactgtaaatttccctttaagtgatggtttaggtgaatttcatggattttgatatgttgtgttttcattttcatttagttgcccctgtcatttctcttgtgacttctttgagcattggtgtcttagaaatatattttctaattcccaattctttgggtattttccagaaatttttcaagtatcgatttctagcttaaatctattgcgggtacaggtgcggtggttcgcacctataatcctagcactttgggaggccaaagcgggtggatcacttgaagtcaggagttcaagaccagcctggccaacatggtgaaaccctgtctctgctaaaaaatacaaaaattggctgggctcagtggctcacgcctgtaatcccagcactttgggaggccgaggcgggtagatcatggggtcaacagatcgagaccatcctggccaacatggtaaaaccccgtgtctactaaaaatacaaaaattagctgggcgtggtggcacacgcctgtaatcccagctattcaggaggccgaggcaagagaatcgcttgaaccctggaggcggaggttgcagtgagcccgagactgcgccactgccctccagcctggtgacagagcaagactccatctcaaaaaaaaaaaaaaaaatacaaaaattagctgggcatggtggtaggcacctgtaatctcagctactggggaggctgaggcaggagaattgcttgaacccaggaggtagaggttgtagtgagccgagatggcaccactgcactcctgcctgaatgacagagtgagaactccgtgtcaaaaaaaaaaagtctattgtggtcagagaacatactcagtattatttcaaaccttttatatctgacatttgtttcctagcctaagatgtggtctgtctttgtgaatgttccatgtgcactagtaaagaatgtgcattccgctactgatgtgtggagtattctgtaaacgttaattagctcatttaatagcactgctcctatctccagtgtttttactaacttttttctcttattttgcagtaaaagagtatttgaagcagctctaattaaagatttgtctatttctgtttttaatcaggttttgcttcatgtttcgaagctttcgttattgagtgtatatgcatgtagcattgtttttatatatttttatataacatacatgtcatgtattatatatattatatgtatgaattatatatctcttaaatgtatctgtgttatatatacataaacagaaacaaggtcttgctccatctgtcaggctagagtgcagtggtgcagtcacagctcactgcagcctcaacttcccagactcaagtgatcctcctacctcagcctcctgaataataggaccacaggtgtactcaccacatctggctaatttttttcattttttgtagagctggggtcactttgctgcccaggctggtctcaaacccctgggctcaagccatcctcctgctgtggcttcacaaagggctgggatgacaggcatgagccacctcaccgggcgtcattgttagattttcttgatgacccttttacaaacgtcatgaaatgtctctcttttgtccctggtaagagtgccgttctgaattctacttggtctgatattaatttaagctctttggcattctatttgattatctcttcccatgcatttacatttaacctatttatagctgtatttttcaagtgcctttcttgtagatagaattataggctctgcttttatatctaatctgacagtctctgccttttaattatttagacctccacggtctagtacagttgctactagccacatgttaaaattaaaaattcaaatcttcagtcatattagctacatttcaatcctcataacaaatttctgttgtatagcactgatttacatcatttttatttattatgactgtcaatattatttggtttaaaactaccatcttgctttatttttctcttggccccatgttaatgattccattgtatttccactattatcttgtttacctctttgtttttattattttaatgatttgctagaatttataatatccttctttgatatatcagtctgtgttcaaataataacagtttcacatataagaacctcgcaagagcgtccttctgtttcccttctcccaggctttgtgctgctgtggtcatattttacttctacatgttatgaaatcacaacacacttattttttttgcattaaatgacctttcaaagagaccattagtctttttttctatccttgtgccattgtcacgatttctaattttttttcatactaagtcttactgtccagtggtgtgaattttctgtgttgttcttcagcaatgtcttggctgttcttgacctgtttcaatataaacattaaaatcatcttgtcctttttcactcacaccaacacgctaatccctactgtgtttttgattggccttgtgttgaatatataaattgatctggagagaaatggtatctttataatactgaatcttctaatatatgaacatagattactctttcatatatattaggattcttgagtttctctcagtgttttttttctacttctctgtgttatggacttggacatctttccaaggggtttgatatgtttagtgcagttttatgctgttaatatggtaaatggcattgttttgaaattttcattttctttttatttgttgattatatacagaaatacgacttttaaaaattgaagttatatccagtaaccttgctgaatttattcactaatttatagagcttatctctatacattatttttttgtgttctctgtatacttttatatcacctgggaattagtttttttaatctttattctaattcttaaacattttacttattctatgagatcaggtaggatctctagttcaatgttcaatagaaatggtaatactaggtattatcctaatcttagggggtagcttctaccatcataccattatgtttgctataggttttttgtacatattcctatcacattacaaacgtgcccttttttttttctttttttttctttttttttttcttttaagagacatggtgtcactatgttgttcgggatagatttgaacacctgggctcaagtgatcctcctgcctcaacctccagagtagctgggagtactgtagattgacaccaccatgcccagcagaagcacctttattttgtttgctgggatctttgattttttttttaacataatgttgactttatcaaaatatttttctacatgtatttggctaatcacataattatactcttttatgttaatgtggtaaattatatcattaaattttcatggaataaatacacttaggtcaggacatgttatttttattaaatacatatcactggctttaattagttattattttttagaatttttatgtatgtttataaatggagactatcatataaatacttttttataatgtgcatgtcagatttggcatcagtgctgtgcttgcctgataaaactggttgagaaacttctgtggaagagactgtataaaattgctcttattccttccttaagtgatgagtaaaattcatcagtgttgccatctgggcttcaagttcttcttgtatgatagtctgattagagagtcagtttctttcacagttgtaaggttgttgatactcagattttctatttctcttgtattggttttaatacattggggtttttttttttaaggattttgactctttcatatacgttttccaatttattgacataaagatgttaagattctatacggagaccccgttttcatttctgatattagttttgcctttgatcaactctatgatatgtctcttccctgtttcactaatttctactcccatctttattatttttgtccttattcaatatgctgttccttttctaacttcttgagatagacagttgtcactgattttcagtcctcctcggttgtattccttgtatcttaaaactttaggccaggcacagtggctcacgcctgtaatcccagcactttgggaggccgaggcgggcagatcatgaggtcaagagatcaagaccatcctggccaacattgtgaaaccccgtgtctactaaaaatacaaaaattagctgggcatgggggcacatgcctgtagtcccagctactcaggaggctgaggcaggagaatcgcttgaaccggggagtcggaggttgcagtgagccgagatcgcaccactgctctccagcctggtgacagagcgagactccgtctcaaaaaaaaaaaaaaaaaaaaaaactgtacgccaggcccggtggctcacacctgtaatcccagcactttgggaggccaaggcgggcagatcacgagggtcaggagatcaagaccatcctggccaacatggtgaaaccccgtctctactaaaaatacaaaaattagctgggtgtggtggtgcgtgcgcctgtagtcccagctactcaggaggctgaggcaggagaatcgcttaaacctgggagtcggaggttgcagtgagccgagattacaccactgcactccagcctggtgacagagcgagactccatctcaaaaaaaaaaaaaaaactttaggctaggcgcagtggctcacacctgtaatcccagcactttggaaggcccaggtgggcggatcacaaggtcaggagatcaaggccatcctggccaacatggtgaaaccccgtctctaccaaaaatacaaaaattagctgggtgtggtggtacatgcctgtaatcccagctactggggaggctgaggcaggagaatcacttgaatctgggaggcggaggttgcagtgagccaagatggcgccactgcactgcagcctgggtgagagagtgagactccgtctcaaaaaaaaaacaaaaaacttgactgtggcttttgctggatccaacaagttttttttatagatcatttcatcatcattcagttcagaatattttccagtttctattttgattttatctttgatctaaatgccttttctatgtatgtctctcggtttccaaacagggatatcttctagttaactttttgttaatgattattgacataattgttttgaggtgagagaacatattttgtatgatataaatccttggaagtctggtactgtttgctatgtggatcagcgtatagtccatcctggtaaatgttccatgtttatttgaaaaggttgtattctctacagctgttagtgctgtgttctctgaatggaattaggtcgagtttactaatcatgttcattttttctgttgtctttgctgggtttttggcctacctgcctttataagttactaagaggaatgagttaaatctgtcactatggttgtaaatttatttctccttttcattctatcacttttgctttattttgcacctacattccatacatacagatttagaatttaatatcttactgataaagcaaaccttgtaacattgtgaaatatattctttagttctaggaatgtgttttgccttgtcagcgtttgcatggtggatctttttcctgttttgtttttttttaactttctgtatgtttatatttaaggtaggtctcttgtaagcagcttatgatttgattttgataacgtagattccatataagtaccatccaccttaatcaaaatgcagaaatttgcatcacctcagaaagttccctctgtgaatcatactctccataagcaccaccattgcttatggggagttgattttaatcaatatagataaatttccctattcttgaattttacataaatgcaataacacagtatataatctttggtgtcttgatttctttttcatgaaataatgttttgcggatttaaccttgttgcatgtcccagagttttttgtttgtttgttttgttttgttttttattaaactgaggagtgatattctcttatatggatagaccataatttgtctattcctccccctagttgaggacatccaagttccagtttttgactattatgaatatacatgctatgaacattcttttaaggtttttttgtggacataggttttcatttcctttgggaactagagtagaattgatagttggtagggtagatgcttctataacttaatatggagtcttgtagactccttagtattatttacatacacaatcatgttgtatgaaaataaaggctgacttcttcctttccttctagttttttccatgccttgttgcacaggctaggacctctgttaccatactgaataagtggtgagagccaacatccttaccttttcccaatgttagggggaaaacattcagtattgtaccagtaagtttgatgttagttataggttgccaatttttaggatgaggaagttttcttgtgtttctggtttgctgagagtttttatcaagaatgggtcttgtggccgggcacagtcgcttatacctgtaatcctaacactctggaaggccaatgtgggaggaacgcttgagaccagtgtgggcaatatagtgagaccctgtctccaaaaaaacaaaaaaattgaataggtcttgaattttgtcttgatattttttgcatctatttagattattttgtttttctcttatgttaatatggtgggttacagtattaaatattgctaagtaacaaatcgtcccagtatttacctgcctgaaacaacaaacatttgttatctcacattttctgtgtatcaggaatccaagtggcctagctcatatggttctgtcccactctgatggtgttgcaatcaagatgtcaggcagggctgcagttatctgaaggatcctcttccagcaaggctcactcacatggctgttggctggaggcctcagttccacagttctttgccctttgagcctctccatagggctgcttgagtgtcctcataacaaagtagctaactttccacagagcaaatgattcaagagaaagagcaaggaagaatttgcagtgcctttcgtgacctacttttgggagtcatctaccatggcttctgttcagaagggagttactaaaccaatcccaaactcaagggagtagggaataacctccatgcttgaaagtaagagtatccaaaaaaaagagtgaattacattaattgaatttcaaaagtttaacttattttatagcattatctgtatctaatcatgagtaaacatcagacaaactcacattgataaacgtttgacaaaacaactggcttacaatctccaaaagtctcaaggtctaaaaagtcaaagagagactgagaaactgatccagatagaaggaaactataaagagtcataacaattaaacgcaacatgtgcttttgaactagatgttttgccaaagggatattatcaggacaattggcagaacgcaaatgggttctgaggaatagatggtagtaatatgtcaatgttaagttcacagttttgattatcttactctgctttacataagaaaataatcttgattgtaattaatctacactaacattcaaaggcaataggcaactcactatcaaatgggtaaatcctatacctgcaacttttctcaactatttgcgaaaaaaatgttatatatattttttgagacaaggtctcactttgttgcccaggctggagtgcagtggtgtgatcacagctcactgcagtcacaaccccccaggctcaagcgatcctcccacctcagcctcccaagtagctaagactacaggtgcacaccaacacacatggctaaattttttttattttttgtagagacagggtctggctatgttgcccaggctggtctcaaactcctggactcaagcaatcctcctgtcttggcctctcagattgaattacaggtgtgaaccagtgtccagctacattctttatattgtacttgcaacttttctgaagttggagattatttcaaatttttaaaatgatggctattttactgtatttcccgccgccccccacaatgtcatttaaagacaactggctatttgaggtttaaaaaaagatgataacattgtgttgtggatgccctcttcacaggatctaggatttcccaaaccagccctagctctcttttcctccctacttaggtagtccttactttagtcaggctttgatacactgctctgggcaccatggctcccttccaccttccatactcaagaatacctacctgcttggcctacctactagcaactcttgggctaaataattgttcaaaaaaaagaacaggaagaaaggaggaagagcaaaagtagttttattttacacacatattagcattaccattgctcttcattccttcctgtagaattgagttttcatctgatgacatttaccgatggtctaaagaatttctttgagcatttcatgtattcagggctggtgacaagatcgcctcggtatttgtttacctagggtaatgtctgcattgcatattccctttttttttttttttgaggcagagcctcattctgtcacccaggctggagtgcagtggcgctatctcggctcactgcaagctccccgtcctgggttcacactgttctcctgcctcagcctcctgagtagctgggattacaggcgcctgccaccatgcccagctaattttttgtattttcagtagagacggggtttcaccatgttagccaggatggtctcgatctcctgacctcgtgatctgcctgcctcagcatcccaaagtgctgggattacaggcatgagccacggcacctggctgcatactcacttttgaggtatgtttttgctagatgtagatttcagatgttttttctttcagcactttactgtgtcattctgttttatcctggccttcgttgtttttgttgagtggcgtcatcctccttcatattgttaccctatatgtaatgccttttcattctctggctgctcttaagacctattctttatcttttgttttcagtaatttactttaatatgctaaatgtgtaatatactctgggttcactgcgtttcttagatctgaaatttgattagttttacaaaatttgggacatttgcatccaaattgttttaagtatctgttttgcaccattctcttggtcctcttatgggattccaattgtatgtatgttaaactgctagatattataccacaggccatggaggctctgagtttgtgtccttttccctacccccatctttttctctctattcttaacaatcacataatttctcttgatctgtctttatcttagttgattcctctacagtgtctccaaatctgttggccctctttagtcatgggtttcacatccaggggttccaccaaccacagattgaaagtatctgggggggaagagtctgtatatgtactaaacatgtactaaacatatatacagacttttttttcttgtcattattccctaaatgataaagcaactatttacttagcttttacagtgtattaggtattgtaagtaatctagagatgacttaaagtatatgagaggatacatgtaggttatatgcaaatgctatatcattttatacaacagttgtgagtatttgcaaatttttattcgtggggggtcctgaaaccagtcccctgcggatactgaaggatgactattctgttcagtgtgtctaatatttttcccccagtatttagatactgtccttaattctagaattttcatttggttcttttatatattttacatgcatagttcccccatctgctcactcaatatgactttctttaagtctagattatatttatagtagctgtttttaacatctgtatctgctcattccagcgtctggatcatctcaggatctgttacatctacttttttttttctcttgaccttgggtcacattttcttggattatctagtagttttttatattgtactggacactgcagaagatacgctgcaaagattttagattttcgtatcttccactgaagagtgctgttttgttttaacagaatgttaaattatgggctaatcatcttgaacttgtggaagcttcatcttaacactttgttcagacggttgtgttgggatgtcgccttatgacaaatccttattcttgggacactatctttgcttctgagatatggcctacctcattatcattgaaggtgtccagtgagcctctggattggcaggatttaaactcccaacttttctcccctacagttggaaacaactgaaatctctgctcagctctttttttggccttccagctgttgctgtccattggactccttggcatctccccagttgcatgtgcaattataggaatcagctgtggctctgagaggagtctgtgtatggatttgcagctccttcttttctagaacatcccctctctatttccagccacactggcagccctgaacctcatcctctgtcacttctagccaacgctggtggtttgtcctcaccttgattttttatcactttcttcctctcttactgcatttcagccacatggcccttcttttcaaacatttgaaaagaaatacagagacccaactcaaggtctctgtatttactgtttcctctttttgaaatgttctcccccctctaaatattggaatggttggatcttcttcccttttaggattcctccaagtttttgctatcatcctatctcaaattgccactccagtcactatcaccacacagtgttttttttaatcttcgtagtaaatattaaaatctataatcatctatttgtttatttattgtcagttcctgccacttgattataagctgtatgagaagaggaaccgtatctgaaatgaccacagacagctgtatcctcagcccacaatagacgctcagtaaaaaattattattgaagattttcataattatatacatttattgtctatttaaccaatctcttattgaccgttctcttatcagcttttacccccattattccattgaaacaccattgttgtagagtttgactaaatataaaccacaaatataattcgctttttattgtatttgccctctagaagtatttggcattatcttgacttttttttttaatcctttggtttcctgggatacggttctggttctcctttctacctcttggggcttcctccttcttgtgtttcttggcttcaatgtccacccctaaaatgtcacaacagaatttcttgcatagtctgtgtctcttcctaggtgatttcattcacactcagcactttgatggccacctttctctagtgactccaggtgacgggtatttaaacagagacacctgggactccacatatctaccactgaactcctctttctcctcggtcatccccaagtaccttgttctgccttgccataagggagcatttaacaagtccttcgtacaaccactgtaaacaacaacttagcaaaaattatcaaatgtaagtagtaatgataacgatgggcatattatatcctttaaatgtaataactcagtcctttaaacaatccactatgctttccaactcataaaaagtcacaagagaccatcattctcacccaaacagccaaaacaagcaagataagtttttaaaagcccattaggcagctgagcacacaaagaaacctaaataaactaaacttcaataagtgatagaccattcagaagagagccgtagctgctctcatcctctattgaaacagagggacagggaaactttgccatagatgggaacagttgggctcttaactgtggagacttgaagtggggcaggtgagctcagagcaaactcttcacaggaatttctacttttgctgggcatagggtgacagcagccaaggtgcaagaatccatgggtggagctgcaaagcaaaggaatctcttaaaaatcttgatctgattcactgaccctctcctctgctgtgtccagtcatcttataaaatgtccatataaagtcagataagtagaaagtatccaaactgaaatgcaaagagaagagaaagatatttttaaaagacatccaaaatctgtaaggtgctgtcagtttcacaattggcttccctgaaagaaaggagaaggacaaaggaaaagaataattcaagagataaaaggtaggagctttccacaattgatggaagtgatcaatgtataaatctgataatttctgcaaactcgtcaggataaatacaaaacaaaccacaactccacagtctaggtatatcatagtcaaactgctgataaccggaaataaagagcagatcttaaaagcaatcagaagagggataaaaaacatgttatatacaggaggacagtgataataattatctctgacttttcagcacaaacagtggaggtcagagtataatgatacagcatctttaacatagtttaaaaatatatatatataggcggggtgtggtggctcacacctgtgatcccagtacttctggaggccaaggcaagtggatcacctgaggtcaggagttcaagacccagcctggccaatatggtaaaaccctgtctctactaaaaatacaaaaattagcagggtgtggtggcgggtacgtgtaatgccagctacttgggaggctgaggcaggagaaccacttgaacccaggaggcggaggttgcagtgagcaagatcatgccattgcactccagcctgggcgacagagtgagactccatcataaataaataaataaataaataaataaataaatcccgccagctaattctgtatccagcaataattaattaattaaacctgccaactaatctgtatccagcaaaaactttcttcaaaaataaaggtgaatggagacattttcagacaaaagctgagtttgtctacagtaggcccatatcaagaaatattaacaggagcctatttcatccagctaaaaacactattggctttaaatatatatgtaacaattatattgtttgtttgtaacatatgaagaagttaagtaacaggcaacaggagcacaatggatgggagggaaatatatgaatatgtggaattcagctggcagagtcttacattgttcatgaaatagtataatatttggaagtagattgaaatttaaagatgcatactgtaatctctagagaaactattgaaaaaatagagacacacagagaggtatagctgaaaatccaacacaagacataaaatcgagggcccagtgccatggctcacacttataatcccagtgctttgggaggccaagttaagggatgaatgctggaggccagacgttcaagaccagcttgggtggcatagcgagaccctgtctctacaagagaatgaaaaaattagctggattttatgagccacacctttagtcctagctacttgggagactgaggtgggaggattgcttgagcccaggagttcaaggctactgtgaaccattattgtgccattacacttctttaaaaaaaaatttttttttggccaggctcagtggctcacacctgtaatcgcagcactttgggaggccgaggcaggtggatcacctgaggtcaggagtttgagaccaccctggccaacatggtgaaaccgcgtctctactaaaaacacaaaaaaacattagctgggtgtggtggcgggtgcctgtaatcccaactacttgggaggctgaggcatgagaatcgctcgaacctgggaggtggagattgcagtaagcagaggtggcaccactgtactgcagcctgggcgacaagagcgaaagtccatctcaaaaaaaaaaaaaattcttttttttaagaagctgaatactgccgtccatatttgatctatccaaagaagatagaaaaagaagagcagagaaacaaataccaaaatgggaaacattaaacctgccatataaataattatattgactgtaagttttcttattttgagcttttttttttcttttttttaaattacagacttcatgttttgcctgggatagggacagtagttaactggaaatgggcatgaggaaaccttctggtcattggagatgtcatgcgtcttattctgagcagtagttacacaagaatatttttgatggactccgtgatataaaatatatcacaatgtctgtgaatataatgtctgacaattttactatgtttaccaactttgtacttttttttttttttttggccttattgtattggctagaccctgtagtccagtgttgaatcaaaatgtatgagtagacatccatgccctgttcttagggaatagctaaaattaaaagagtaaccaaatgttggcaagaatatggaataactagaactccataaatttctaataaaagtataaatggtttaactactttggaagactctttttatgtttataaaaacacttgtacaaaaatgtttatagcaggcttgttcattatagccaaaaacttgaaacaacttaaatctctcaacataagaatgggcaaagtgcgatatagtcacgcaattgaataccatctggcaataaaaaaacactgtagatgaatttcaaaaccattgttaaatgaaagaagctagacacaatagagtacctattttatgattccatttatttgaaatccaaggacagttaaccctcatctctgaagtggaagtcagaaacggcttgtgtggaatggggacactcttagtatgctgttatgccgtcacctcattccctttgcctcagcagttctgcttctaggtctttgtcgtacagataaactcacatcatttctaaaccaattaaaaattctccaaggttggcacttgcagcattgttgatgagtgggggtctgattatatccatcatggtgcaggtactcaatataatacaggaaaaaagccatcttcagaaaacttgatatacttaggttggatgatctcctaggtataggatagagaaaaaaaaatcaaaggtatgtagtatgtattgccatctgtgtttaaaaataaaagagcatatggggaaactgtatatgcatgtgctttatctaaacctaatgtatttctgaaaggaggtctaagaaactgctaagatcaaacttccagggagaggaattcaatggctggaaaaggaaggtgggagatgtttgggtctatccttgttttgtacgttttgaatattgaaacatatgactgtattacctattttaaaaattaaagaatacagttacagtttggaaataactgaaatagttcatcacacacagagttggctgaactgacagaagcctgctacatagacttgctgagaactctccctttccctcaccgcagttgataccttgtggattttgtatgttagtcttaagttgtcccttttgtcccttcctgcccatcctatctttgtccaggatcatttccatgggccgcttagcttgcttcccctccttgctgtttgttttctttgtttgtttgtttgtttgtttttgagacagtctctcgctctgtcgcccagggtggagtgcagtggcacgatctcagctcactgcaacctccacctcctgggttcaagcgattctcctgcctcagcctcctgagtagctggaattataggcgcccaccacgacgcccagctaatttttttgtatttttagtagagatggggtttcaccatgttggccaggctggtctcgtactcctgacctcaagtgatccactcgccttggccttccaaagtgctgggattacgggtatgagccacggcgcccggccgctggttttttttcaattatccagcccaaaatgtcagccttgctgttctttttgacccacttcccttcgtcttgtctgtgccctcacagggcttactgttccccaatttttgcctacatcatctgtctctacttctgtcctggaggatccttaaaagtagagactttaaggatactgcctggaatctggggggataaaaagtattttattgtctcttgggaaaaataaaactagttcatgaaactggtaggttttaaattttaccaatattgttgcttaggcaaggctcagtttaaaaaaagagagtgattttttgaaatattcagtagtaattcaaacgaagcaacataatgcaaatggtacatagaaatgtaccttttttaaaatatttttagaatatctctgaaatattcactagtaatacaaatggagcagcataaatggggtggcggagctctggcctccaggagattctggcttacaaggaacagggcctcacaccaaggaggcacttgttaccagccttcacctgcctggagccttctatgtggtcacctaactgcactctgcccaccccaccctccaagtctaaccctgcagagcagccaggctgctgcttgacattcatgattctctactttgattcttgccgttgctcttcatggaatgggacccccctgggggtcctcgcccatcttctccctcaactttctggctcagccccatacttcacctcttctctgaaggctttcctgatgcatttgtttcctcttgctgctttaacacatcacagcaaactgagcagctttaaaaaacacacacttactcttttatagttctggaggtgagaagtccaaagtcagttcacaagattaaagtcaaagtattgacagagctggtccttctggaagttctgaggggagaattcatttccatacctttttcagcttttagcaactgccttggcttgtggccccttctttcatcttcaaggcccgtcattctcttctccatttccatgttcagatcaccttctcttctggctctcactcctcttggtcccacctgagtaatacagggtcctctctccatcacaagatcctcaatttaatcacatcgggcaggtctcatttgccatttaagggaatctgttcacaggttctgaggttaaggtgcagatcctaggatgccatcaccattctcctgctcacagtctgtccattcttcacttacctcataggataattacctggtaattatctattcacctgaccagtacccccagtgtaagccacttgagggctgtgatgggctctttctcaccttgcctgcctggtgttcctgccatgtggtagaagtccaggtgtttgaaggagtgaacagattgcccagtacaaatagcactgtagttcagagcacagacttgaggttcgactgcctggctgtggatcctaactgcacctctcaccagccctgtctattctgtgtcccatctgcaaaatggtgatgaagaataaaacccagcctggagcccacagtagagggattcagttgggtcacatgtgaaatcattagaagagtgtctaacaataaagtcaagacagttttgtcattgttgattttgtttttgatgtgaaatggtatatgttatgtaaattattattgacaagtttaggaaaggataagctttttgctatttagttatgtttgtttatttttttttatttttttttgagacggatctcgctcttgtcgcccagactggagtgctatggcgcaatctcagctcactgcatcctccatctcctgggttcaagtaattctcctgcctcagcctcctgagtagctaggattacagggacccgccatcacacccggctaatttttgtatttttagtagagacgaggtttcaccatgttggtcaaactggtcttgaactcctgacctcaagtatcagcccgcctcagcctctcaaagtgctgggattacaggcttgagccaccgtgcccagcctgtttaaagaaatcttttccttgattttaaatattttccaaaaagtttttaggctgtatgatgaacatgtagaaggtgataaaggatttgcttaggatgaccatgaacctgtggaacagtccgttgtgcaccactctgctttaagtgggtatcgactgcttgggagagattactatgcagagttaatccttagatctcattagcctaagagatggtggagattcaagaaaaggttaaaggtgtgtgtgactatggaatgcacacaatacttcactgaatttatggatacacttgagacttccggcttcttgaagccactctaacataagccaaatgtgcgcttaaattcagctaaccctcactgagaacccatcaagttctttgcaccattctaacagagacaactttgtgaaggtcccttgatacctctgttagaggaacttctagatgtcatgtgcctttggtctttttatgtctcaatcttggtattcagtggtgtttccatcagtgtacataatccagagatccaagggttgtttgcatgagatttctagttttgagaagtgagaatcctttgttaattgtaaaatgtgctggattgttcatcctcgggaggcactatatgccattatggggatgacaccatcccatatgccatgcaaagaacagggtttgcagtaaagagaggtgctggaatgtaatgtcagagcacacctatgttccaggagagctaaacaagtctactgcagttaaagaaaagaaatgtttaaaataccttgcaacaagttttttcattgagagcacgtactctgaccaaagttcatgactacttggtgtgcatgaagaaagtcatatttttagaatgccatgataaatggagaagtatatgaaaagcattctagctttaggaaataatgctagtatggattttagattaaagacataataagatctgcctaagcagagtgaagagagatggtttagtagtgaaaaataaggttatcagacaagtaaatggcaggctggaaaataaaaatgtatcatttgaatggcagggagccattgccagtttttcaaaaagcaagatattaaagttatcataccctctgcatcatttaacttgatcgttaaaggagtgatcctagtgatcctagagttctagtgacaacgggagggaaaaattgtagtagtcccactggaagattagggtccaatttatgaatttatttcagggattgaggttcaagtgtagattaaatataaaatgaagaaccagacagctctacttcaaaattggatgcaagtaacaaaggacaaaggatagttgcagacttcgtttctgttctgtggaaggcagacataacgttctgtgattgagatcttggaatttggggtgatttgtgggggtagagtggaaataacgccctattttcaccatgttgggcaggaagggtgatgaagtatctaaattgtgtagttaaactaaaatcaagcagatttggaaaagtgctgttctcaacaggtgaagacctgaccgtaggaaggaatccattgttgagtcctgctcctgcaggacttctgcctggggctagcccagagctcgggaggcgccacaggcaacctccccctcccatgtctcaccctgaatccaggtgttaccactacggaaaagaatccaatcctaatgctgaggaggaagtggttcttacagatgtgataggccaagattttaacctctcagaaatcaacagaaatgcattgtggggttgaggggagaaaggttggccacttgagctgtgacgtggggttgggaaaaaactcctgattcaaacgtgaatgagcaggaaagagacaccccctccttccaaaaagcgatatgacttcttagcagaattccagagctttgagtgagagagggacacagtgactttgctgtaactcctggattttgctggttgcctgtgggctagaaggagttggagctggtggcttggcagaaggcaggaaggacactgcttgggcgtactcagccttgcactagttgagccacttcccacataccctaaaggccacacaccttgctaaggttgcagagcccaggtctgctctaatctcaacgttttacctgcatttcaatagtacttctcacttcatgcttcaggaagtgcttggccaagacaccctagatctgttggcataacagacagccacttagcttgtaggctacatgataaatgttttgttggagttctaggatagcaaggagatggagagatgaggaagatacccctattacagaggaagagttacagcgaggcccctacactcaaagaacttaaaattctcatgggtaagtcagacattgaacaggcaaactttaaaaagaaaaaaacataaatgaactactcagatgttgtgaaagctgctctaaagacaaagtgcagtggtgagttgggtgggaggctgcctggtggggtagatggcacaggtgtctatggtcattaacatttaagctgagacccaaacgatggggagcatctggccaggggagagccagtgggaaagcatccaaggaagaggagcagtcagtggtccgtgggaaggtggacacagggacaattgaaaagatttgagacttgagaccagtttgatgactgcagtggccaaggcaggatgtgctggggtcatgaaccagggcagcattgacacatgagccaaagaaaagacatctctgactcagcaaaagtcagaaaaatggaagtcacagcaagtatgagtggaaattcgtctgttctctagttgaaagtgttgactggggagctggttgaaagtcttggggcttataacctgttttctctgagaaggctgaaacaagctgttgtcctgaagagacaggtagctggaagtggtagagaactggaaaggaggagagagaatgtgggataattgctgtggaatggaagaaggcctaagacgcatgcccagcagacaaagcgtagaatcttcatggccgtccacatagttttgtaatttttcctccagcgaagccaccacccaaccattgggtagaggaagcaggtggagaggctgttggggcttttctgggtggttgagacaagacaggcaaggaggctagagaactggtggtgtgggcaagtgatgctggtgatcaatggactggaagccaacagcagagacttagacccaagaagggagcttgaggtacaagaaaacttcagggtagacaggaaggaggcgtggtgaaagtgatgaaaggggagagtagaagggtggtccagggtcagacagggagttagatttaatccttcagggcactttcattacatcatagctgccattttgtcttttatctgactcaataataagtcagtaataagtaatgttttaattaaaggtaaatgcttggcaggtaggttaaacttcattgagtcccaatcctgtcataattattgtgtatacctttctcagctttttgtctacttgaaatatatttcttcttcctttgagcagccaaaatggaagtgttggatgtgttggctctgttggtaggctcctgttggatgcctgttgtcactcataaatgtaacaccacaaccataattgatggagagttgagttgcaagcttttaggactaattgcaaagtctaaactaaaacatttcctggagctgcctttaaataataataataataccttgtatagatacagtgctttacaatttacagagcacttccacatacatcatctcatttaatcttcacaataaacaatgctttttgaatgcttagatatttcctaagtgagaaaccatgttgtacatcctgatttaatcatagtgagtcaccaaaagttcttgatacaataaccatttatgagtaccttctgtgtacaaagcactttactaaggataccaaggggtaaattttcagtaaataaatatccaataagtagtacctatcagtaaatatgatcttgcctcctaatttaccttcgcttcctagtcacagtcactgttttggaggctacttgccatggcataaatttatataaatattgccaggaattcattgtatcagagttgaagttttaaaactaaggattctgatacttgtctaagctcatgattcatcagaaagtcatcctgtctattcaacttgcacttttcttgaagattatcacttgaatctcaagaaaaatatttcaaggcctcagcatatctgaaaatgccagccattgagttcaatgtcctgattggagtgatttgggtacaacttggccaaaaaacaagagtacaatttggcaaaaaaaaaaaaaaaaagtataacttcgtacttggttccagaagtcttatttttcattagaaaagaagacacacccatctttgggctctactggccagactgggatgctttgagaagactgggagacaaaggacttcctgggaggctgccctctgggtgaggggggaatggaaggtagtattggagctgggcccaatcccagggcaagaatcctgaacctgtgtcctggagtcccccaagtgtccaggcgtgtcttctgggccaccatggctcttcagaggatacacagattttgaggtctcactcaagattctccaaatgtagaacccccaaaataataggaaccctgccgtcagagtgccctgggcagagtagctccctgaaagtgagcggtgtgacctgcaaaccatgattccttctcccatccggggctcgatgaggccccaaggtgtgatgttgaacttcagctgagaaacccgttttgtcgatgaaatgcaggtggtcgtcaggggcactgatgatgaatcgggtccccttggtgcagctgttacttctccagccatcttcctgctccttgttcaacaccttaatgttattaattcgcatgttaacactagctctcactcacctatttacatgggaatgtggtttgggaattgggggaggacaaagccagatcctaaaaagttttttttttaactagtgtatacattcctggacatagttttttaggaatattttcccatgataacatctctttaaataacaggttttgtgttttacaagggaggctaatgtctgtgttgccaaactatctcttgattcttttgataaggagcttagaacccttccttcttggtgtcgggcagatgtgcctaatgctttattttgacggaggatatgcactcagcatctgagcatcccataaatactccagagaggaacacaattaggatacagcgtggtgctgggagactgagcgttggttgagtctaagtgatgtttccgactggggctggaaacgtgctttacataattgtattctgatcatttaggtctctctttatagggcatcttttatgaccaagactgtccagtaccaaaatgagctacataaattcctaatctgggatacagctggacaagaacgagtaagtcactctttaatttactctgtttttctgaggcccaaatgaaagttccaactaaactgtcagcatccctgtcatctcacgttactcacttctcttctgtgcaccggagacacatttatttccatttgcgtaggccagcctttgcctttgccttttcaattagagccacagagtccaccgatggagaaagtgataatgggcactgagggcatttttataccttgcagtgtcttaaagtaaatgctgaccaacaggcctgataaaatcccactcagagcactgtgtataatttggggctctctcctctagtaaagatatataaagcaattagtggtagaaagggtgagttaagcacaactcatttatcgctgccttttaaaagctaaagagggaactttacagcatatgaagggtgagatataagtgaaaaggataagctaacacagtgccttgcaatagatacttaataaatgcctgatgacaaaattggccacaatggttatctgcttaaggaagagcctgaaccagaagcggggcctgaacatggcagcatggggtctaatggaatttggggaagcccacccaaatcagaaagggccgggaaggcagggatggggacaaacacatctgcttcctcccctttcctctgggtactgagacacatctgcctcctcccctttgctctgggtactaagacacatctgctgcctcccctttcctctgggtactaagtccaatttcccttccaaggtgtctctggcagccaccccattattcagctgccgtttaattttgttttcaaacagtacgatccaaacagcacatctgatagatgcatggtgctatcttaagctcttaaaagtgtaccagaagtaatcaggaaaaatagtctgtcatcacagccttatctaagacaccatagatagtgtgtgtagtatgaaatctgacaagaatcatcacagacaaatggaggaaaacaaaacaagccattactgttgtcctagacatagactccatgcatttgtacaggtttaatgtcttaagtttgctctgtttggtttcttctgtttttaacactggatgttgtgcctctgtcccattactcatctaagatattctgcttaccgtcttccactccccattccttttcctttgctcatgttgtacatctagaatggagcatttaggacagctggacctttgctaaccatccctcttctgtccttcagaagtgtgtcgcttaccagaatcctgaatatatctgtagacacagccctgggttctgtcctgttagccacgaatccgtgtggcccttcctattagtaatatatgtaccctccactaaatcccaagtttcagttacccctcacatatatttgatgatacagcaaagccctcatcataaagaatcatgctgtaatatagattccattatgctttgaatcagagcctgtcctggtatatgcagtggcgtataacatctctttttttctggaacacaaaaaaaaaataacacaaaggtgtttgcctctctccctttctgccaccatggtagcagaagtctgtgaagttttgtacttagctggttttcctgcctcttgcttgtccacttctcattggttctgcaacaggagtagttgctctgagatgcaaacctgccttcagcctgcctgatgcaccatcacacagcccagagctgcacaggagatgctcatggggccaagccacaggccaggggtgctgaccaggatgccctgcatggagaagacaggagaggagcaccacctgatgagcacacactccagccagttgttgctgggcgtgagcacatgtccagggttgccaaagcgcagtgctgaggaaagccacacacctgacagctacccacaaattgtttgaaatgctgggaggatcacacaagacacgtcttgtaagcctgtctgggtcagggactgcccgtttatcctgggcagtgcattgaaggtccagaatgtgccatccacagccaggctctattttcacctcctcccaccagtctgtcctctagtacaaactgcgtgctgttctccagcatgccatagtttcacaccctcatgcccttccacaactctattcagccttcagaaccaacctccaatgtcacctaaagggggctttcctgccatccctgctctcggacaagtaaccacatcgccacactgccgtgttgctctagacccatatctggaggcctccctgggttcctcccttggcctcagtgctggacaccttctccacccaggtgtcctgacagcttcattctctacatgtatcgcaaataggttcacttctccatctccgctcccagcatcctgctctcagccacctttggccattcactgagtactcctttagccttttcgtgggtcccctgctttccctctgtccatgacatgtcctcataggacccagaggaatcttctggaaacaaaaatcagcctgtgttattggcctgcttaatatccttcagtgacttcccactgcacctctcataacagccacactctgaacagagacctcccaagccccacgtgacttgcccaggcctcccccggggctcctctcttctcagggcctccagcactccttggcctcatgcctctggatacgctgttccttctcaccaaaactctctgttccctccactggagcccagctggctcctttcccgtcttttagtgtcaggttaaatgtgatgcactcagagttttctctaaaccccctgcatctaagcagggccccaactttgttcttcattactgcccttactcattttcctcagaacattcattaaaaattgtccttagatacctgtctacctaccttcattgacagaatctcccatcagactgtaactccaagagctgggaccacagtgtcttgttcactgctgtactcccagggcctagcatggtgcctgacctagagctgatgttcagatattggttggttggatgaatcagcaaataaactctttggagtattcctttgtatcctgaagtctttgattgctgtcatccatgggattgtcacctgtttccttacctgtctgcctttcattagactgtaagctccttgagggcaaggactgccttcatatctctgctctcagccccttggcacatggtattgatgcccataggtttatgtctactgattgccagccctacttaggcacagataaggacagctcctctacctacttttaccatgtgagtagtgcatgactcaaattataaatttctgttgttgtatgtttattactctttgtagttatgacatttattatggaaccaaaattgtcgtaaaatgaaaacccttttgatgaattgaccattcagacatcctccccaacctccccatttgacatcttgtactgcacatagttttgacagatggattgtctttctgatggtccagctacgtttgattgcaaagtgatttcattaagtcaatgaaagtgattttggagaatttctcaaatgtcctgtgaagcccttgacagtagggatcttgttaacttaaatgaagaggaaaaatactgctcaggatgatgatataagtgcttcagaagataatggtttgtgtatcaaagggttaagaggggcctagggaaaattgatgaagccctcaaatatttttgtaaaaatttgtcatttttatgataagactatgaaagtcaaacatgaaatgaaggatatcgtattgtgctagtatgtagttttatcagaaaattcatagccaagttatcaatcaagttcgactcagtgttcatccagaaaattagctcctggctgcaataataaacctaaggtttttcaaataccagataaaattaaacttgattttacaattttaagtttatcttctcaagatagagtctttgtgagaccattttgtccctattatttgctatcttgaatgaatgcatttaaaatcaccctttttccaccaattatctccttcagtaacaaagactcctgcagtagcattgagacagacacaacacatatattaaaaaacctcataaatacaccatacctgtagtaagagcatgtcaaatacttgccatctgtgtgtgattgtataaaagaaagcttcttggccaggcatagtggctcacgcctgtaatcccagcactttgggaggccaaggcaggcggatcacctgaggtcaggagttctagatcagcctggccaacatggtgaaaccccatctctactaaaaatacaaaaattagccaggcatggtggcgcacacctgtggtcccagctactcggaaggctgaggcaggagaatcacttgatcccgggaggtggaggttgcagtgagccgagatcgcaccactgcactccagcctgggccatggagtgagactccatctcaaaaaaaaaaagcttcctaaccagagtctaatagacattgcatccagtctttaaaaatgtacattcctgcatcttaatatggtttctcccaatgactgtttttacagagatcagaacactaggaagcctcagacttatttattgtcacagtagtcatgtaaggaattgttctcctgtttaaaatcaagaacaagtgtagtggcttagtatcatctagaattggggcagacagtcccagaaaccagagtctgcagtgcatcatccacactggccagtgcacagttaccatccacatgaagagacaagaagacctgactccatgagtagaagcaaacccgaaagtgatcccattattagaatttgcagacagaatttacacatatatttttgggccacatccaacctgccaccagtttttgtaaataaagctttcatggaacatagccatgcttgtttgtttattatctatggcagggacgtccagtcttttggcttccctgggccacattggaagaagaattgtctcaggctgcatataaaatacaccaacgatagctgatgagcttaaaaaaaaaaaatcgcaaaaacagctcagtgttttaagaaagtttatggatttgtgttgggccacattcaaagctgtcctgggccacataacaggccgcaggttagacaagcttggtctgtggctaccttcactctacaatagtagagttgagtagttgcagcagagattatgtgacccataaagccaaaatattcactacctggtctttaccagaaaaagtttgccgtcacctgatctagagccaggtttggagcagagatgtgctgacagcttttgagtctcttacatgcctccaccttctttctttgcatcaaaaggacatgaaagtttccatgtcagtaatagcgagtggcttgccctcccacagctaaaaattatatataaactccagacaaagctttaaaaaaacaactgtttgaaggcactgcagagcaaccaaatgcagtcagggactgcaaaggggagctttcttgtgtaagatccacatttttacagcttttccccagtgggtatttcccagttcgagtggcacagggtagctagtacttaagcagaaagcttgtgttgagtgcagagtttaggactgctagagcagccagaaaaagaggaggcaaatcgcagaaaagggattcaacaaggagggaccccctaaaatctgtttataaattccctgaagtttttttgacccccaaattgtgaattcacaagagagacattataaaatgcaacagaaaccagtagctggcaagggtgacaagacagcagagatttcagctgctcctcattacagcagggctagacttcaaagtttgaatccaatcctgctgtgttacaggggatcactaaacaccttgggcattccgatgaaacttcagaagagccatgccttgggagtagaaaccgtgtcctaggactaagggcaaatccaaaaacccaagtagaccaaccaatctcaggatgagtcaccagtaacttaatactcttcagagaagaaaaaaaccaagcgtctacagtgcatcatccacactgtccagtggacagtcagcactactacacatatgaagaaacaggaaggtgtgacccagtgagtagaagcaaaccctaaagtgacccttttcttggaatttgcagacacagaatttaaagcacatattttacatatgttcagagatttaaagaaaactaggccaggcacagtggctcatgcctttaatcccagcactttggaaggccgagacaggcatattgcttgagtcgaggagttccaaaccagcatggacaacatggcaaaagcccatctcttaagggaaaaaaaaaaggagtgttaatgacttaactgcaaatggggaatctcacatagaatggaaactaataaagaatcacatgaaaatgctaaaactgaaagctgcaatatctaagatgaaaaactcactggagggtgatagaacacattaatcagaagaatagaaaaacagtagaaaaatatggacagagtctcagtatcatagggacaaattcaaacagtctaacgtatgtgtaattggagagccaggaggagcaaagagagagatggaaacagaaaaaaagatttcaagaaataatggctgaaaatttcccgaatttagtgaaacataactcacaaatccaagaagttcaacaaatctgtaagttcaaagaacaccatatctaggtaagtcgtagtcaaactgctgaaaaccaaaggtaaagagaaaatcttgaatgcacccagaagtaaaagacacgtaaacaggagaacaacaatatgaatgatggctaactttacacataaacgccggagaccagaagccagaggaacaggatctttaaagtgtggaaagcaaaaacctatcagtttgccaaaattagttttcaaatataaagtcaaagtaagaacatttttagaaaaacaaaaacagaaatcaacagcagctgtcccagaaggtttttcacactaaaggaaaatgacaccacatggtaattcagatccataggaagaaataatagccactagaaatggcaaatagaaacgtatgttttttcttcttcaattattcaaaagttaactaattcaaaaattataacactggattgtatagtttatagcatatatagatttagattatttgacagtggtagtacaaagaatggtaggataacaagaaattagacttttgcaagtctctgatattttacatgaagtggtgcattttaaactaagtagactgtagaaaaacgtgcagtagtccagacacaggggctcacacctgtaatcccagcactttgaaaggccacgacaggtagatttgaggccaggagttcaagatcagcctgtccaacatggcaaaaccccatatctactaaaaatacaaaagttagccgggcatggtggcacttactgtaatcccagctacttgggagactgaggcacaagaattgcttgaacccggcaggcagagcttgcagtgagccaagaacacaccactgcactccagcctgggtgacagagcgagactctgtctcaaaaaaaaaaaagaaaaatgtgcagtatatattatagttacaaaagcaacaacttaaaaaataatacaagcaagtacagttcaaaagtcagtagagaagttaatatactaaaattgaacactaagaaaaattcaagcaatgcaaaagaggaaaagaacggaggagcaggaattttaaaagaaatggaacagatacaggccgggcatggtggctcacgcctgtaatcccagcactttgggaggccgaggcaggtggatcacctgaagtcgggatttcaagaccagactgaccaacatggagaaaccccatctctactaaaaatacaaaattagccgggcgtggtagcgcatgcctgtaatcccaactgctagggaggctgaggcaggagaatggcttgaacccgggaggcggaggctgcggtgagccgagatcacgccattgcactccagcctagacaacaagagcgaaactccgtctcaatggtagacctaaatccaaatatattagtaaatacattaaatataaaggagctgaactgctgaaccttccacttaaaaggcaaaggttgtcaaaaatcaggacccaactatgtgctggttataagaggactactataaatataaaaacaaataaagaatgcaaaaggatgtagtattcaaataataaacaaaagagacccatgtggttatataatatcagtaaaacagacatgaaaacaaggtggaagaaggacattgtgagaagaatattgaggaactttgtgttgatagaactgtttgacatcttagtggatgatattcacacagatatatacatttgtcagtttatcaaattaaaatttaatttgataaattttaaatttatcgtaaaactcaaattaatacgaaattttaaaagccaaaaggttaaactcattggataagcagttccagaatccatagttctgtatgtggtttatgtatgtgcaccaaatgctcccctgtgataatccctgcctgtgttcaggggtaaaccaccattaacaacaggatgtaaatacagtgtcatcagatcataagtaggggtcaggcttcagagtcagggtgcaagacgaaaattaagtataggcaaaattcttgtcattaaacattgacatcatatccagttggtgagatgctcacataggacgtgtgcccaagaactgagattgactgggcaaagagcttcacagtctccatctcacactcattgagagaaatagctcactgaatcacccttgctgttcaaatggttattcctctcccttctctttcctccctgttgtgtgtcaccggttgtggaggccagggtgaccagggtgatgagtgggaagaagctgtgtattcagggttaaattgatgtaaatgaaatgagatctgtacccagcatttgagaattgccacatgcaaggagatatcaaaaaagcaagttgcaaactcatccaagtagtgaatgtagatgtgtactcatttctgaaggacaatcagtgttcagattacagggttttctttatgacacccaaatgcagctacttctctggagaactatttatagcattatttttatctcccctgatagttagggaagccaaagtttaaaggactattgaacaaatgaatttgggaattataacattgagttcaattaaaaagcctttttagctgaaacaattgtttatagcgccatatttaattcctataaaactgtattctgaactatcttctgagagacatttcagtgttacattaaaagtttttgcctttggtaattactggttcatttgctttaaagcagcatgtcattttcttggcttaagagaaagattactttttgtgcagggataatgggcttataaatctagtataaaacatatttaaccagttttcccaattttgtttatttttccccctcctctgcagtttcgtgccttagcaccaatgtactatcgagggtcggctgcagctataatcgtttatgatatcacaaaagaagtaagactatatagttttctttagattgttttgaaaactcttttggttgcttagatctccagttgctctcttttttgtgtgttacaggagacattttcaacattaaagaattgggtgaaagagcttcgacagcatggcccacctaatattgtagttgccattgcaggaaataaatgtgatcttatcgatgtaaggtaagttattagaacgagagattacaatacctattatgtgttccttttcttaataagcaatatccagtttaagaatcttgcttttattttatctctgacattgaaaaattccttttggttgtgtggttggagtcctaaatttttaaactaaaattaagatttcaggcatttggagctaattatattatgtatacagacaggtgtgcaatttacggaaatactggttgcgttgcatccaacattatctgagatcagagcagcccccaggctcccatgacttagaatacttgaatgcagaaagcacatttattggcagtttccctgggccacttccatcattcccaaagcaagggctttttgaaaattttggctggggaagaaaaccctgccatccctaatcattccattagctacattactagtggtaccgagttttgtttcactttgtttgtttacccatggatgtggtgtaatcgagaagaccatgtctcagggcccatccagcagccatttagtccatcctttgtcatcataaatctggttaactactgggtaggtgggggtacaactaagatcttcatgggtagaatttctgatatgtagttgttgccttccagagaagtcatggagagagatgcaaaggactacgccgactctattcatgcaatttttgtagagaccagcgcaaaaaacgcgataaacataaatgaactctttatagaaattagtgagtatctctgtgccttatccatttcctctgtaaaagccgcttaacacagaatgatcttcctggttagaattcctgtcttacttagagcagtctagtctctgatattgtgatcagtgaaatgaagttggagaaggtaagagtaatgtccagttttcatatcatgttatagttgctgaagagctgccgcccttctggaaagagtgttgctactgaataaataatgcacagggtactgaggtcatgaaagctgtcccatttctttctctatttaaatatgtttctgttagtcgtccaaggtcattgaaaatgaacaaaatgaataaagggaaatgaaatgcaggtatacttgcacggtaagaaaaccctcaaaaataatactaggcaagtgaaaggtaagacctgttttcccttctctttcccttccctttccagaagtgttaatatgatgatactcgatgggagaggggctgctgcatgcctttgggatcctctgcagatcgtatctatgtttattcatttcattcaaattcatcaaaatatttattgggagctgttccaggctcaggggaaatagccgtgaagaagatagacgcagcccctgctctcctggagcgcacattctacagagggaaacagacagtgaacaccaaataaataggatcatttcagatcataataactgatacaaagaaaataatttaggatgaaatgaaggaatgtctgcaagcaattggggaaggtctccctaaggaggtgctatcagagctgaggtccaaagaagcaggccctgtagaggtgtggggagtcacataaacatgtcagacttccaggtggagaaaagcagaaagccgtcagagcagggtggatgtagcgttaagatccaccatgtggttgagagccaagggtactgaagcagggagggtcctttgccattgtgtcgaggaggggcatgaactccagagcccaccaaggccaggcaaggttgacccatgagcagagcaggcccaggtgaagccttgggaaccccagctcaggccaggcccagctccatcagctggggccacactggaatgtgggcccctggttgctgaggttgttttcacattttttttttacatgtcccattgtttagatttggccaatcatttaagtattttcagagtactttgcaggcctaaggagcccatctgctgccagatatggccagtgaactactgattgcaccctctaggccagcccgttcatttcagtgttaaaacgtcatgatgtgcccgggcatggtggttgtcacctataatcccagctactccagaggctgaggcaggaggatcacttgaggtcaggagtttaagaccaccttaggcaacatagtataaccctatgtctaaaaaaatataaaaatcaaaatactagggcattgtggcatgcacctgtagtcccagccactcgggaagctgaggtgggaggatggcttgagcccaggaatttgaggctgcagtaagccattgattgcaccgctacacttcagcttaggtgacagagcaaaaccctgtctcttaaaaaaacaaaaatcatgtttattgttgtcctggatgtaaatagcaggtacccagatggatttttgaaaggcaacataaagccagttgggaatttttcacagctcaagctaaaatgtctaagtgtgtggtgtcatgagtatgttaaaattactgctatctttttgtgttcttcactttagtggtattaaaaacaggaaagtaggccagacatggtggctcacacctataatcccagcactttgggaagccaacatgggtggatcacctgaggtcaggagttcgagaccagcctggccaacatggtgaaacccccatctctactaaaaatacaaaattagctgggcgtggtggtgcatgcctgtaatcccagctacttgtgaggctgcggcaggagactcgcttgaacccgggaggtggagattgcagtgagccgagatcacgccattgcactccagcctgggcaacaagagcaagactccatctcaaaaaaaaaaaaaaaggaagatagtaaactataccaacaatgaaaagtcttatataaaaactagtatgtacatattcaatttaactgtgaaaaacaaaacctatatgttcacaaagattagaaaaattgggagagatgtacatagactttcttgttcactggcttagtaaaactgcgtgagcacagtgcctggcacactgactttgtattgaagtataatagacatacagaaatgtgcacgtatcagaagtataaggctcagtgaattttcacaaactgaatatactccggtgcttggcactctggttgggacatggccgttcctacacccaacggtaaccatcctgatactaattcttcagattggtttatctggttttgttttacatatattttgtactttatatttttaaaaacactctgtttcctcttgtgtgtctggcttctttcattctgcattacatttttagaccatccatgtcattgcatctagctgtgaatgatccactctcatggctggtttgtgcgtgtgagtgtcagagtccgagttgtgcgggtaagggggcagtgaagaatacccacaatataattatccattctgctgttgatagacatttgggtagctgtttccaatttagagttattacaaacagtactgctctaaacattctgatcgtattctttggtgaacatctgtacacatttttgttaggtatatttatacccacaagaaaaaatgcttgtcattgagtatgcatgcattcagtacagctttaccgccaaccagttttcaaagtggtagttgtactagttgacaaccataccggtagtgtatgagaagtccgatcaccttctgtctctggtgggtagtcagtgatctccattttcatgacagttaatgaagtcgagcacatttccgaatatatgtttacatttgtcgtatctacatatcctcctttgtgaagggcctgttaagtcttttgcctgttttcctgttgggttacctgcctccttcttaatgttttatagttctttattttggagatgagtcacttattgactatgtatattggaagtatcttctactgtatggcttgcctttgatttttttagtcaactccttcgatggattgaagtttttaatcttcatataatctgactgatccttgttttcctttatgtttagctgcattaggtttttggttgctgttttagaaatcattacctgttcccagctcatgaaaatattctcctcttatttcttttaaaaatattatttgttcaacaattttttgatgtcatatttcacagatgtctcttagataccagctatatttcaatatccatttattgagaataatgacaagaagcttgggtaaagcttttaaacagatttgtagtatattcacagcagtgtctagtcatttgaaaagtagttagaagacattgggagatactttctcaatgtagaaaccatgctgtgtactccccacacagatccgcagacaactcaaagtggtggaggctcaaggcttgagagaacctgagtcagcggagaggccatcttagccttgttaatgtcaaaaggtgtacatgtccatttattccatgtttacaaaatacttctgtgtcaggtattgtgctgataagatactggaaacataaagatggacaaataggatctcttccctagaagagcttagggtctaatgtgagggagatagtcatgtaaacagatatgagatatgtgtagtaacctgtttctggtgtcctgattgattgtagtgtctgggatgttacagagtaaggaagtgggagggtgtcaggaaagcctttgtacaagaagcaacccttgagttatcagccaggtaggtagatgggtgatttaaggattctcttgaaattgtcattatgcttcacggagcagtgaagtgaaacctgttcattctcatgcattgttggtaggagaatatagtggcacagcctcttcagagagtaatttggcagcatctgtcaaaatttaaattgcacattcttcctgcatttgtgctagatagacactggaatacaatgtatgtgtcagacaaatacccaggagtagaataccgtgacctagctcttccactccgggcattaatcctacacacatactcgtaagttcagaaagatgcttcttgcatctttgttaataacatcaaaatattggaaacaaactaaatacccatcaatagagaaatggttaaatgaatggtggtacatctacaaatgcagtattttagagctgttaaaaagaaggcagcaggccaggcacagtggctcacatcagtaatcccagcactttgggaggctaaggcaagcagattgcttgaggtcaggagttcaagaccagcctggccaacatggcgaaacctggtctctactaaaaatataaaaattagccgggcgtggcggtacacgcctctaatcccagctactcgggaggctgaggtgggagaatcgcttgaacctaggaagcttaggttgcagtgagccgagatcatgccactatactccagcctaggtgacagagccgatagcctgtctcaaaaaaaaaaaaaaaaaggtgacggctctttctccatgtactatgatgccacaatccccaggatgtgttgagtgaaagtatcaaggtggagaatggtgcatatggtttgctttatttcttgccccatttggccttggaaaggggagatgggtagggatataggtgtgcctgagtgtttgtgcatatatgtctctggaaggctacacgagaaatgggccacagtggtggccttgtcatgagacagagggacaaccatgttctgactgaactttttaaaaaacaaatcctatgtattacctactcaaaacaaaatgtttttgatgtgtggctttttttaattaaaaaacgtttactaagtgctgtgtgatatccttgtttggatcctggggcagaagcaggacatgtagaaaaactgatgctatctgaaaaaagtctggagttaatagtgatgtggcaatgttgaactcttcattttgacaaatgtcccatggtaatatgtcagcactgggggaaactgggtgggaggtacacaggagctctatcatctttgcagcttttctataaatctaaaattattcgagtataaaaagtttattaaacttttttttttttttttttacttcagtgaaacctgtcaaattgcatctgcaaaattgttgtgtctgagaaagttaaagctcactcccttcccttttctcatcttggtttaggtcgaagaattccatccactgacgccaacctgccatctggcggtaagggcttcaaactccgaagacagccttcagagccaaagcggagctgctgctgaccgaacctcagcctctcagacttgatgatgaagtaggtggtcctgaaagttaacaggagggctggggtccctgccaccagttttcacctagccagtcttgagtcttctccgtgcaaaaaggattcacagaaatggaccagttctgttctccaaagactgcagcaatgatatttcagtctgtgaacttctattatgtaaagaatctctagtgtacaaagggactacatcgttggcttttgaccttgctgaaaaggaacatataattgtatggatggtaggattaagttgttgagtagttttgtaatcaagattttatgtaacatttgtaaagggaaaattagcacttttgtggttcttaagggaaaagaaacagaccttgtggagattataatttccttggtttctgttaccactgttagagggagttgtatcatttaacatatagtaggatagtttaagtgtagggaggacaattattgtctgaagctaaaatgggttatttataggactgatggaaatgatttcatctctgccatctctaaagcacttttcattgaacatgttagcctaggatacgtacagtaaattaacaatgatagcagcagatgcctagctcatcctgggtttgcttctgaccttgtcatgtgtgtgccaccaaacacgttattggcacctttttaaataagctctcatgatcaagatggtgatggtagagaagctgcccggaataaactgaatttcatatgttctaaaatgactagcaatggtttaaaaaggaagaagagtggaagtgaagaaggtggtataaatgctgtcaatttttttttaacccaagtattttggtggggaaaagcaagtatctattgcttagcatatgtaaagttgtagtctatatttatggggccattgcttaaagattataaattatgtaaatacattaataaattctaagtttcatttgacattccattgaatctcgcacccagtcttgcgtatgcctgcccagttttcagcctcttaacgggagactcaagcacattggtattgtataaaggtatagagcacttagcttacaatctttaaaggtttctctgccttcccttctacccacccgcctcccaccagatcccatctggaaatcataataaagacatatgccactttgacaaacctgactagtccttactagcctgagggtaaaagattaagctccaacctcaagtcatttacctggtcttggtaataagtttcttttagcttgtacagcatcctcagaccaactgaggagctttccttgttaacaatttagcttatctttctgtttcctttatttttcccctgcctctgttagtggttaacactcttttccctcagggagcctaatgaggtttttaatatcatctaaaaataaagcattgaagtgaagttggtgaaaatttgttcctggtctaatttggcacccttccaacctgagtattgtaggggaaggaaatttacaagatttaataggaaatgaaacagcttgaatttcaaactaaattgtattttcagagctatcctgaaactgaacagctgaaactttaaaaaataattggtattattttgtgccccccacttaatatggatagattttaatgggaaaattataattcagattaaataaaaaacaattcccttttccctgttgtatatcttaagcatttggaattttttttatcttctgaaatcatataaaaagaatgtcattagtaaaaattctaacttcgttttgtttaaaagacatgtggatgctccatgcccctaggattttgcttcctccccggtgctaaattagcaagctcctagagaagccatgtgattcccagagccaggcgctttacacctaaagtagtttgactttcttctgtatacatccagatggatcccaggcatccgggcaccaccctggtgtgtccctagaattcccactgctgggcctctatctccatgacaacaaaataaaaacagaggttgcttgactcattaccaaagaggcaaagcatgtgcgaccctttctgtcttattttaccaaaagatggtgcaaatctatgaccttcacattttttccaccacacccaccagtagctgttggtgattgcatggtgtctcggtgcatggggaaaggcaaggtcttctgagctcatcttaactggtgaggcatctggatgtgtctgatcttactgtgatgttttactgtaccgagcccaatgtgggtccatctcatcagccctttgctgatttcatgatttctcaccctccctcccatatgtagggtgtgattctgttttattatagccacatgttttattaacagaatgagtgatatgaagcttgtacttatgcatttctcgggcctcttccctcattttcatcagtctgtctaagaacttgactcggcactgtttctcgtgtaatatccttctaatgcttagcaacaacaacaaaaaattgctctctcagatccataatccatactcagtgaaagcagggaaaaaatattttcacttattttatttgcttctaaaatgcaaagatgaatactaaagtcagaagcagtgtttcattttgaacacattttggattattaagctgactaagcaatgatctaatacacatttcatattttctttataataatttcttatggagaagaggctatatttcaaaggaattgagacatactcccatctataaacatgtttggttttcttacgatacagggccatttttttaaaactctcaggactgaacagaagagaaaaattattaattagctgctactgtatgttgattcttttcggagaaattgaaataagctctttgcaggcgtccaatcctagaaaccaatggtctccagaactctcacacaagtgtttttctgattctatgataactaattaaccatcatctggtgattaaaagaacataaagtaagattatgattaagtgtccatcacctgcctgtcagccgtggtcagaataagttttacacgaagcaggtgaaagatttagttcttttcaaagtaacttattttcttgtgacccgtttatgatgttgtttgaagtccctgtttcccattgtgtacgcactttctggatgtctggaaggatcgggacttttgtgtgagaggcttgagcgcctcctctatgtgggctggtgtccttcttgaagttgtcaattcctcttattcttaaatatctaaagggaaaggaaaccaactttaatttcagaacttctctttacgtcttgtatgtatttcttttctgttctcaaggaggaaaattggtctaggaagccttctaaattaaactctgggaaatatagtaatgaaaatatcctttagctaactttcctgtaactgtcaaaccaaaatgtcagtatttttagggcattgtgttaaaataagcagtttagattccgacgacactgcactaattggcatgtcagcctccagctcagaaaggcatttgctcatggttacaggcatcttttagattctaagagtgagttacagaattctttttggtactttcacttattctttcagaatacatcaaggatgtgatttatgggcccttaagagtataagatataggtgcacagtatgttacttaagtaacggatgagcccccctaaacatccacgtgtctctgcaggaacctgtgtaagtattgtgaaaacccttttcttccagggaaaaattattggaaattccttaactgagctatacttggtacttgctctagaacatttgggaaatgacaaactcaggctggctctcctctctaacctcactgggctataaatgttccttctaactctgtaatgaaagttcagtgacaaactagatagtgaacctgtgaaagtcattatttacatttgctttaaagggacagttttaccgttcaacttcaagagtttttctacctctttaacagttaatattttttaaaggaagaaatggaatgtaccttcaggggtcaagctgttaactgtatacctgcctctagttagcttggtttatcaaaaggatttttaaatgattcaaggtaatgtttaggatatttgttttaactcctgctgtgctgtgatttaaaaaaaaatagtctaagaaacaaatttatccatgagataaacatcatattttatagttttagaaaaaagggttgggggtggaatttagcctagaacttaaagaaacaacctctgcgaatttctcttgacagcggagttgcttgtcttgacttctaataatataaatccaggcagtttgattatccgatttgcaagaaactttaatggaattctggggcatttgtcctgttttatgtgcaaatgaaagtctaaaaaatatgaggaagatattacatttttcaggagcctccattttttcagtctaagagaatgataagtgagaggcctattgtgatgaagttgcattggacataatgtgggaagtgaataaatagaaccaagaatcttcatctatctctgttggtctttcaggattctcttagcatataggaaaatgatttaccttccagatctcgaaggacttccaatagcatagatcaggtttaatttgatggtctataccatcagaaataactaatatctgttttctttccttttagagtataatcaattatggataggccagaatatttttggcttcaaaacaaaaggattcataagcttaaaaaaacaaaaatcccaaaccttccatctatcccttttattacgttgaacattttagatagtaagattaagatgtatcattagtatatggtgaaattaaaaccgtggtgtctaacagatttaacaaaaagtgtttaatttactgcaagttcatttttagatctgtatggtgcccagtactccacaaaatgcatcataattgaaacaacaaaattattttcatgagcaagaattcaagtatcaaggcctatcagccaattaaaagccgtaagatagtaatgattttttttctttttttttttttttctttttttagatggagtctcactctgtcgcccaggctggtatgcagtggcgcgatctcagctcactgcaacctgtctcctgggttcaagcagttctcctgcctcagcctcctgagtagctgggatgacaggcgtgcaccaccatacccagctaatttttgtatttttagtagagatggggtttcaccatgtttgccaggctggtctcgaactcctgacctcaggtgatctgcttgcctcggcttcgcaacattctgggattacagacgtgagccaccgcgcccaaccagtaacgatttttttaaagggcctttcttaattgacagttttaagctgtagacattaatattataacaaacaaaacatgccagttttactgattccgctttttgcttgattcaggaacttttcattgtttggggaagcttttgaatgcagtactgtggaggaaatcatccttaaaatagcatttcacacatagggccaaaattgaaattgtcaaggaaacccctcagcatctaacgtcatcttgtagaagagctgggcatacctcttcctctaggccaattcagaggccactggccacccaagtagagtggggcccactggcatgagtagtccctgtgcccatgcccatggtggtgcttgactttgctttggggcttaatcctagtatcatttggccattaatttttaattaagtttatacttgaataatcagttttactcctgaaaaattttgaagccagcactgactttgtttatattcacttaccttgtatatgaacttatgacattagagtttgtgaaactgtcttaacgtggctcatacacgtgatgtcagagggactggtcagttctttacagggtgaattaatcggcagctggctagtcagagcaactgatgggtggcttttttttctttttttttttgagacggagtctcgctctgtcacccaggctggagtgtaagggcgcgatctcggctcactgcaacctccgcctcccaggttcaagcaattctcctgcctcagccacctgaatagctaggattacaggcgcccgcccccacacccggctaatattttttgtatttttagtagagacagggtttcaccgtgttgatcaggctggtctcgaactcctgacctcacgatccgcccgcctcggcctcccaaagtgctgggattacaggcgtgagtggtggccctatttttaaaccattcgttacgctgtgtagacagagctttattgccctggaaaagattttttttttaactctcatgcagttcagtctttccatcatttcactttgtgagtcactcacataattgtcaatcattcctctgaccttcttaagaatttacaccttaccgtctctgtgattgaagcagacttctcgctttatttcccttaggctcatttttctgtgggctctcccttaaagacacatggccacagacacctccttcgcatatgtaatctgccttcccctgcggccttccgtggtcacagcaacagggactgctcaccccctccagctggggcttttctaacaagcacagtcagaaatgcgcaggcctggggttggggatgaacagaagttgattagtgggcacagaaatacagttagatagaaggaatagttccagcattcgatattacagtagggagactgcatttaacaataattgattgtatatttgaaaacagctagaagaataagaatattcccaacacaaagaaaagataagcgaggtgaaggaaatcccagttaccctcattcagtccattacacattcgatacaggtatcaaaatatcataggcacctcaaagacatgtacaactcttaatttaacatttttgaaagaaaaaaaaaccggccagagcattaaaacaaataaaataagaaacacagaggccagtgttaggtgaagaactccgctgcttcagaaagagaatagcagcgctcgcttaccgtgggaacacggccagttaacaaaatgggttttggttttttgttttgttttgttttaccattggtaataagatagttaacataagtggtcagaacttcgctgaatttgtaataaagcatttgttaagcgtgtaaaagtccaaattaaaagtcttgaagaaaaacagctatggcaatgagcctagacatttttcaaaaaaaaaagctaagccgtcctaccagcaatctctctttctcctaagaatgtcatgccttctcaagacctgatgaaaggaataagatatttgtgcctttttataaaagcatctattacgaaagtaaaattcagttgcttacagttttggccgctttgtagcactattataaacagcccaaatttatggccttggacttactgcatgacacatggcctggttacctgtcatggaatgctgcagtggtggtttgccaagcttctgtggatgtttgaagactttatttttgcagtcttaaccttgggctggacctaagtgtatgtaaaccatatgatgcctgtattgtttatagatgctgacaaaagaaaactagaccttttgttttttgttgtaagatttttgttttcatgcctatgctcatagtagatagtttgcaaatgaaagttgatttgccatacttttaaataatattgttttagcttgaatattctataatacacttttatagagtataacatgctaaatcactgttttgttgtaagaagggtgtaaacattttgttaataaaatgctatgtttacaaatatatatttgcctcccaaatggtttctctttgtgatattactcatcatatgttcttcttaaccaaatactctgaagtcatttttaaatgacctttggatactgaagtaccagaattttgacagctgtagtgtctggtgagcagcaagttatttgtaccaaggtatctgaagcttcccagcttcccatatccttatcttatacaactcctccctctccttgctcttcagtagttaagatgggggttctagaagcaggtcagcaaggccaccagtgagcacttagagggaagtttgctgcccctggaagaaaggaacggtgcagtgccctagattgtggaagaaaaggtcttccctcatcttccattattatggggatttcatcaaagatgctagtctttccatcccagtgttgacttgaaccctgcacccccagtactcttcattgccagcagaagcactggctcacacacacccgtgctctctttgctgttcctcttaggtagaagcacatttgcctgtacagtgtaggtgtgccaaagagtacctacaagttcaagtgagggaaccagagagagcagagagggcttgagacaaacaggcttggatttgagtctcatcagagcatctttccaagctatgtggccctagacaaggcccttaacctctctgacctgtgtttcttttatcttcacaaagggaaggtaataagagcttatcccatgtggctgttcgggtgggatgcctgtagctgtcgtttaacacggcattaacaaagcacaaacatctcacagggtttatttctgtaagccatctccctgataatcactttctgattcagttaaaataactttgctataagtctgctggtttgctgttttgttttttctatgtttttaagtataaaacctacaaaaaatgtcatgaatcttgggtacagctcaattaaatttcacgaaggttacccacataaccaaccctcagatcacaaagtgggacatctgccacacctcaggtgccccaccttgtgctccttctctaacatcactgatgagttttgtctggtttcaactttatatacataccatgtggttccatatgggtctggcttctttcatccaacatggtatgtcgtattctcattcattctcactgctatgtaggattccactatgtgaataaaccaccatttatttatctagtctatattgataggcattggattatttccagatttttgccattatgaatggaccacagtgaaccttacatacatctctggtgtaaaggcttgtacaggtttctcttgggcatgtgcccgggagtggaattactgggtcatgagaaatacacacacacacacacacacacattctcaatgtctgtatttgtttttgcttttgtagatagttttctaaaatggtgtatttagctgggcatggtggctcatgcctgtaatcccaacactttgggaggccgaggtgggtagatcacttgaggtcaggagtttgagaccagcgtggccaacatggcaaaaccccgactctactaaaaatataaaaattagctaagcatggtgccaggttcctgtaatcccaggtacttgggaggctgaggcaggagaaacacttgaacccgggaggcggaggttgcagtgagccgagatcacaccgttgcactccagtctgggcaacaagagcaaaagtccatctctaaaactaaagtggaatatcaatatagctccccccagcagtgtgcaagaattctagttgcacagcatccttgctaacacttgatattattattttctgcttttaaagtctggagatctgcagtccaagctgttaacagaacttacctctgagaagagaggcttggcccacagaactgtcacctggttttcactttctcctgtatatgtacttctgtacttttaaaatttttaccctgagtatgtgtggaattttttttttttgagacggagtcttgctctgtcgcccaggctggagtggcacaatcgtggctcactgcaagctccgcctcccgggttcacgccattctcctgcctcagcctcccaagtagctgggactacaggcgcctgccaccatgcctggctaattttttgtatttttagtagagacagtgtttcactgtattataaagtttcactgtgttagccaggatggtctcgatctcctgaccttgtgatccgcccaccttgacctcccaaagtgctgggattacaggtatgaggcaccgcgcctggctggattttttcttattagaaaaaaaaaaatcaggaactctcacactctaatcctgtcttcaaatccttagtgaaaattggctcaatacatacactgaagttgaatttgtcttatttttctccttttaaacacacacacacaccctattcaatttggtcagtaaaaaccttagagccagatttggggcaagtgtgcaaaactttatagcaccgcttcatttcattctgaaatttaatacatatcttttcaagctgccctaaatcctcttggacaataggggatagagggagcataaataatacccgttaagaaggagaatatgcaggtgcctctcacttggggaaaaaagaggagaatattagtctacaccctgtcaagatagtactatggcagaagccagtcccatttgttgttgccaagaaaaagggaatcacagccgggcacagtggctcacgcctgtaatcccagcactttgggaggccgaggcaggtggatcacctgaggtcaggagttcgagaccagcctggccaacatggtgaaaccccgtctctactaaaaatacaaaaaaaattagcctggcatggtggcaggcacctgtaatcccagctacttgggaggctgaggcagacgaatcgcttgaacccaggaggtggaggttgcagtgagccgagatcgcaccattgcactccagcctggggacaagagcgagacttcatctcaaaaaaaaaaaagaaaaaagaaaaagggaatcactacaccaaaaaggaagacacaaattagcacacacccaaaacaaacagggatgttttaaatgcttacacaaaacagccttgctttatttttccacaagcatctagctgcttgccttggagcgtataagaactaaattatggacctagatttctaagtaacttcaaagtttactgcagatttttttttccattagaatttaagaagcagatttccattgagatggtaaactataaaacacagagccttttaaatctgtcagttgtttggcttataataatactggccaaaaacatgattctccactaaaaatgtcagtgttggttgggaagccaagcatcatcagccttctaaaatttacccaccaggagtattactgcttttcattataacaccagtggagcttgtaagagagaagaagggaaaaaagaaagctttcacctagcacctggtcaaaatgaatcactttgttaattatgatcttaatcagacctctatttgcttattttttaaattttaaacacaacttttcagcatcttccaagaaacaatttaaaaatccagagaccacattttgagaaatgtgcttgaagataacagaacctcagatactgctgttagaggggtgggaacagaccaagggggtcagacttctgtttattaatattcagcccagaatgaaacttcaggcctcttttaaataaaatatatggaaaatataaggggaaagctacaaggttccactccgttagaaaaagggcatttttaagaagaaaattgtggggttgtgaatgtaaattagaggctaatgtacagcgttagggcgtggaatatgctccagtggtatactatcatcaacattaaaattgccatcagccgctcaagtgataaggtcaagtcatatctagtttgcatataaacgagaatacacaacagttaaaacacacacacacaaacaaacatgacaacagactgggctgggtgacgtggaagctctctgccagctgggcagtttgcgacctgagtcagtccttaatatccaggccctcgaatcatgaactatcccaccaagaatgttttgcatgcttaaatgtatttttatatttcctatttccaagatgataaaccccttattagagaattgagatccctgtgggtttctttccctgttcttaaattacttctaaaggtaataggagagggcaatgttggtggccaagtggcagtcttttttttttttttttttttttttgagacggagtctcgctctgtcatccaggctcgagtgcagtggcgcgatctcggctcactgcaagctccgcctcccaggttctcaccattctcctgcctcagcctcccaagtagctgggactacgggcgcccaccaccacgcccggctaatttttttgtatttttagtagagtcggggtttcaccatgttagccaagatggtctcgatctcctgacctcgtgatccacccgcctcagcctcccaaagcgctgggattacggatgtgagccaccacacccagcctcaagtggcagtttttataagccacctgtgaaccaccttgtgggtgctgaaaggacagcaagttttgaagcctcttacagtacatgtatgcagatgattattgtgtatatcaaagtctccccccaaaaaaacagccacctgatggaaggaagaacccagccaacgtggaaaagaaaaaaaaagaaaactttacaagctcttcagcattcgctggagtggagggatgtgcaagtttaagtttaaatccagaaattgtgaagagaacatttcaagaagtggaataaaattggacttacttgggatggtctctagaatgtatgacggtggggttatttattaaaaggggcttcaaggccagatggaagacattcctcggtcttttgctgagtcagtgaatgtacttaaactttgcctaccctcttctgtgagttggtgtgtgattttacattgctaaaggataacgttgcaaactttatgaggctactgtgaatagctaatgagggcaagcagtcgggctatataaatcaatattattaattgcaccaataataaacatacaaattccattattagccttagcatacaactgcttgttacaaaaccatgtacattttagtgcctgcttttttttgccatgggtccattagggaattctttattgtttttatattaaagcctaaaaaatataaaagcttgtctttatttttcataatgccgtcatttcaaaatagtacacccacgcatgcatgcatgtacacatataaacacgaaacgaagaaaagaaaaatgacttaagttgcaaagtaaaatgagaaaaagacaaaaggttccttgtagccccagctgcaggagaataataggttcaaaggggttttaccgagagaaatgatgctcagagcagggagcagagaggctgggaaggaacgcaaggacagctgaggaggcaggcggggcgccctggagacgttgcagagagcacagcagctgctgaggccaggcaaaggttgcattcctgccctcccaggtacctgctttcaaaggctgagccatcctcatttattatttgttttgtcaaacattaaaacattcctgccactgcaaagtcctacgtcttagactcccaggaataaataaatgaaaatccaggacacggtttcaggactcctaccacgtgccatgcactatcacaagacaaataaatcaggaccccagtagggaattaattaatcttccaagaaatgaagaaatggggagatggttctttgggtgatacctttcccacaggaagaaataacagaaggtatttatgacatttttcttttcctagttgctgcaaattaagaatcacaggcttttacttaaaaacatgtaaatattggaggagaggggatgtcttcacagagttcaaaatgatggtgaagaaccggttttcagccaggcatggtggctcacgcctgtaataccagcattttgggaggccgaggtgggcgggtcacttgaggtcaggagtttaagaccagcctggccaacatggtgaaacaccgtctctactaaaactacaaaaattagcctggtatggtggcacacacctgtaatcccacctactcgggaggctgaggcggtaggatcgcttgaacccaggaggcggaggctgcagtgagccaagattgtgccgctgcactccagcctgagtgacagtgagactccatctcaaaaaaataaaataaaaaataaagaaccggttttcagtgccccaattcctagatgtaattggggtatttggtacaagaggggtttaccaaccccaactacatgatgaacttacttccttcaccaagtacccaaagacagacaaacccagctgcaacaacagcctcagagaacacaagagctcccaggctcacacatcacacgacccccagattctgacataagacatagatttagggacctcgttgaaatccctggtgatgtgagaccccacgagtgtgccatccttgtgataagagctaacatcactgcagcaagaactttacttgcatccgttcactgagtcctccccagatccaagaggcaggaacttccattatccccaccgtacagatgaggaagtggccgaggctcagacagcgaggaagagataatcagccagaagctggcctggccctcgcagctggccttggtatactctctcctgtcgaagagacactgacatcaacacaaggccacaatttcacaagacaatttcggcaatgtcacaggacactgacctcacacaaggccactctgaccatgatgggtcaaaacataaacaagacttctccgtcactctagtccttgtggatgcaatcacagtatgaccccaagtcttgttcccgacagcacctaaccaagagcaaagctcacttcctggacccctgccctgaaatcaccaatattatccccaatccccgagtctcttctgacccctcttagggaactgcttcacactcccaaagcgcccaggcggcactttgaacttattcccccacacatgtgtcctgggggtctttgtctgcaaggcattgccagcagcctaaggccacacatctgctgagtcacagcgctgcgaagggcaggttgggacccaggccatcggtctacagagcccatgatttccctactgcctgatctgcacagggagcggtcatagcaaagacacattcctttctcagcacaaaatggcagggcctgctgcgagcatttggatttcaggagagcgctgcaggtactttacctattgcagttactcttgtttggggttttcccctagatacaaaagcaaagttgtgacagtcacttgataatctatggctctaagcattcctgggagtggggagcagaaaaatgaaaatggagaaactgaaacttacaatgccatgccacggtctcccctgccctcccacattatacccctctctctctctctccctccctccctctatctctgtctctcccccatctctctctccctccgtctctctttccctctctctcctccctctctcttcccccctctctgctccatctccctcccttcctccatctctctctctccccccttacccctcccttttcctccctctctctctctctcttcctcttctctctctctcttcctccctctttcgtccgctctcctccctccccaaatatatatatatatatatatctccctctccccagctctccctccctctctccccctccctctctttctctcctcctttttctcctctttcctctctttctctccctccctctgtgtctctctttccttctctctctgccatctccttctccatctctgtctctccctcctcctccccctcccccatccctctctctctttccctccctctctgtctctctctctttctctctctcccatttccttctccatctctgcctctccctccccctacccctccctagctctggcattcagggattcgtatttcctttctgatgctggcaaccagaggctgctgcgcagtttctcttctcagacaccctgcggtggctgactagtcagaaggacagtggaagaggggattcgaagctgcatttgcagagtaagcacagtttctaatcagatcaatgaaaataacaaagttttccaatgatgctctcactcactggttgcataatcctttgttaatgtttatgtattattgtcatttctttggggtggcctggggataggcagacagaaacaacagggagaggtctaagaccctcgtccccagccactccttggtagggtcactcaaggttctgtcttactctgctttatctcctagctagacagggggagatgggggtctgcgtgtcttttgtctctgggtcctcggtgttctgcccctgtgcccctccacaaatgtctgctcaatgaatgaaggccgtgaggtggaaaatcaccagggcttggacaaaagagagatttgcaaatttgacatacacactaacaaaacgcatcccctgtcccctcccaactgcctcaacacactggaaatgatctgtggggaccctgtaaaatctccccacagtgaataccatgctcactcactgcctcatcaaacatttatcacacggttcttctgcctcacactgccatgggggaacaatgaggtaaatatgccgttcttacccctgagaagcgtggaatctaattatcttctagagatgctttggggatctgcttactaaatcaatacgaatgattcgtaattagaatatcaattatttgtatgcaaatgtggtcttctgggtgattggggacaagtcctaaggagcaaaaaaacttcccccaccgtgccccctcaaattcttaattacattatttcattcattcatcaaacatgtattgagcaccttttatatgccaggcacagagattgggaccaagaatccatcccctggttgctcacagtcaggaatgaagaatcaaggtgttcggggccttgggagagagcttgcttcttgcgggcaaggggagaaagcatgaaccttcttccatccatcctgactgacagccacctagtttactgagaccttcagctgaggagccagccctgccggagtcctcctgcccaagtctggaggagcctccctcaacgtgggcaagggttagcaatatgattgcacccctttttgtaaagctatgggggtgcctggttctatgactaccccatcccccatccaggttctgagctactgggtctgagtggggatttttgtttgtttgtttgtttgtttttgtttttgtttttgagacagggtctcactctgttgcccaggctggagtggagtggcacgatcacagctcactgcagcctcagcctcccgggctcaagcaatcctcccacctcagcctcctgagtagctgggaccaaaggtgcgcaccaccatacccagctaattttcgtatttttttggtagagatgggatctctctatgttccccaggctggtcttgaactcctggactcaagcagtcctcccacctcagcctcccaaaatgttgggattacaggcatgagccacctggtctctgagtgggttttttttttttaacaaatcctgtgtgccagcttgtcctgaaacttcaacccttggtgaccctgaatcttcattcattcattcattcattcattcatttcttcatttgttcacacactcttccatttgttgagactttgttatgctccaaacccttgccaggtgctagagggtagagtgttcagcagagatggatcagtcatggagctggctctctagttgggagacagatagtaaaaaaaattcacaaataagcccatgcccccgactctctcaccatggcccccacttctgagcaacgttccctcatctgccccatggtctatttcatgcaggtcctccatctccagcttctcactgctctggggcaagttactaaacctcttggtgcctcagtgtcctcatttgtacaccaaagaacatcataatattactacctctctgttgtgagaatgtatgaggaatacacacgcagctcttagaacagtgcctggcatggagcacttgaccaatggtagctgcagttgttgttattattagtgcattctctgcaaaaaataaaaataaaaaataaaaataaaagccaggtgtggtgacacacaccatagtctcttgggaggctgatgtgggaggactgcttgagcctgggagcaatcaacactgcagtgagctatgatggtaccactgcattccagcctggatgagagagcaagattctgtctcaaagaaagaaagaaagaaaaaaaaaaaccactaaagatgctacactgctggatttgaagatgggggaagtggccatgagccaaggactgtgtgtgacctctggaagctggaaaaggcaaggaatgggtttttcctagagcctccagacagaacacagccctaccatcaccttaatcttagccttatgggacccagtttcggatatccgacctccagaactgtaagatcataaatatgtgttgttttcacccacttcgtttgtggtcattttttacagcaaccataggaaactaaaacacatgccaataaggtgctggacccagaacaggagaacagcagctcagtccatgtgagtgattgttattccccttgcctttccccgcgcaagcccccgcagccccaacctttgcagctgttgttcctcagctgggagaacccttccttttttttctgtctggcaagatctttcttacgattttttttttccaaaactgttctgtaacatcctctgaggttctaagttttctctcagtctctagagtaaagttaattgtctcttcatagctttcttctcatccattttcgtgtttatcacggattgtgatgattttgtttttctttaacatccccccgccagacagtgaggctaaatgcgtccagtgctggaggctcacacagtagatgctgaggaaatgcaaaaaataaataacaaattaaatacataaatactataagtaaataaataaattccattaaaatctgattgccaattttattaaaaacctggatgaatgaatgcattaaagaaaaaaagtgagtgatgggtaagtgactgaggccatgaaggatggggggacttggacagccagaggtggctgtgtttccaaaggaggaaaagggatgaagaggatgacaacaaagtcactcatttccttaacacggttcagcattgtgtgttctggttgatcagagggtctgagtgcctgagagtttgccccctacagaaggaggttggaaattcaattttaaaaatgttaaacaagtttaattttagaatagtattttttttgttgtttatttagagtatgtttggagttacagaaaagttgcaaggataataaagagactttccatatacacgacacccaatttccccattcttaacatacattactgtggtacatttgtcaagactaatgaaccgttgttaatatgatgaatacattattgttaactccatattttatgcagattttcttgcttttcctctaatgtcctttctttgcttctggataccactttacctttacttgtcatgcctccttgggctcctctgagctgtgacaccttctgacacttcccttgttttttatgaccttgcccttgagaagtactagccagtgttttatagaatgtccttcagtttaagattttctgatgtttttcttatgacttgactggggtgggctttgggggtgaagaccgcaaaggtgaaatgcattcatatcacatcatatcaagagtacctcctatcagcaggacttatcagtaacgatgttgaccttgatcacctggcttaccaatggcttcccagagtcccactgttaaagttgcttttcccccgactttccatcctgtagtctttggaagaaagccgctaagtacagcccacggttaaggggtggaagttatgttccacgtcctggagggaggagtatctctaacatcaattatttacaatttttctgtatgggagatgtgtcacttctactgtatttattattcaatcatttatttgtcattatagactcaaggatatttattttctactttgatttgtttatttatttatttttgtagagacaaagtcttgttatgttgcccaggctggttttgaacttctgggctcaagcgatcctcccgccttgacctctcaaagtgttgagattacaggtgtgagccactgtactcggcctattttctactttgggttataatccaatactatcttatttattttattattcaaattgtcacagcttcagccattgggagctcttccagttggtgtccctttgacatgttatcattattttatcttttgagcacttccttactttctacctatacaagaggttccaagttcacctcaaatattccctaccccaggccaagaatcatccatatttccaaaaagtcctggtttccatttctggggaaatggtatgagaaactaacatctgggtcatgggtgcaacaaagtgtttttaacatgaaaactttactccggcgacttctgtttctggcaatatggaggattagacatgctgagtgacccttcccatcaaaacaactcacatgctggataaaatattgcaaatgcattgatgagccagcacaaggagtgttctgaagccaaacagtgaagggaagattaagcccttagggataagctgagtcccgaagccgggttttttttttggtttgttttttgttttttgtcctggggaactgtggaagcctgtgaacaagtgatttaattttctcagtactttaggttttataggacaaaagacaaagctcagggcccacccaagttgggaagtctagcaggatccttcagtgtacaatgagcccaaaacactgcccccagccccagaggaaaagtgtcaggtggaggcactcaatgaggggaaatggccaattattctaagaatcaggagcacagggtaggcttcccaaaggtttgcagcccaaattcacactacctgggtggtctgaaaatcttaaactgagacctgaaagctaccctggtcagtgcccaccctccacttctacctggaataagacaaggcaaaggcaaattctttctggaggagccaccttcagcccaggtgtggctgattgtatattctgcagacggctggaacaatatttcctacacgatgtgctctcctagaaacttgccatgtcccaccaggaggtagagtttccatccccaccctttcaaactgtacaggtctcttgactgcctcaaaggataaaatgcagtgagcaagtgatcccacatgacttctgaggctaggttagaaaaggtgatacgcctccatctgggactctctctctttctctttctctctctgacactagcttgcaagccctgagctgctatgtaaaaagtcccgttacctgaagccttgatctggagagacagctcagggacaaaacatataagtcatagagaaatgaccacagagtcccaggtgttcccattggctgaactcttccagccaggggccagacctgtgagcatgcaagccttccaatgattccagactggataatgaagaatttggccttacccagacagatctggcctttgtcatggtgtttgggaagtaatctctgggtcctcagaatgttttaactgataggagtgttcacctggtagcttgtgtcatactggatagtcataacaaggtgatcgggggtggaggctggccagatagcaaggggttggctaccaaagaccaacagtgcggctcagggtggggacttgggatcatgtgatatcagttgacctggagactgaaatcagtcatgtgggcaatcaatcaatcatacctgcataatagagcttcagtaaaaactatggacactgaagttcaggcaagcttctatggtaatactccatgcactttgttacacactaagagtcacacatcctgtattagtttgttctcacactgctaataaagacatacccgagacagggtaattgtaaaggaaagaggtttagtggacacacagttctacatggctggggaggtctcacagtcatggcagaagatgaaggaagaacaaagggatgtcttacatggcagcaggcaagagaatttgtgcaggcaaacttccctttgtaaaaccataagatctcgtgagacttactcactatcacgagaacaggaagggaaaaacctgcccccgtgattcagttacctctcaccgggtccctcctacgacacttggggattatcacaattcatggtgagatttgggtggggacacagagccaaaccatatcataccctgactccatgggggagggcgacagaagctccacatttggagccctctgccctatgctcatcttcccttggctgatttgatctgtatacattccctataaataaaccataaccatgagtacacttgctttcagtgagttctgagggttcttccaatgaattatcaaactggagagtggtttggagacaccaacaaacttgtagtttggtgtcagagggagggtgatttaggaactatgtcctttaactttgtagttggccctaaactccctgcacagacccagctgctattttacgaaagccacatgagaggctctgcgtgtgaaccacccagcagagcccagtcaacccccacaagtgtgagtgagaataattaaatggttgttgatatttgggccgctaagttttggaggtaattgaaatgctcggcctccagggattctcacagataaggtcaaagacaataaaacacacaaggaaacaggctgcactgagccaaagcccccagaaacaataaaagtagaactgcacacatgtcaggcactgaacagactgtaaaaataagtatgtctactatgtttaaagaaataaaaaagggattggtagctatgaagctgttgtctctcagctccaaattaaccctctacaccctgctctgacatactggggctgagtctctggacatgtcatttctcctcagtcagcgggttttctctcaggctccactgggagaggcactcaaggaagacctgaaatcggaagaggggagaagggaccagtctttcttgtcctgttcctgttcttgacagtgttgcttcagcagtgacctttcatccgaaagcagtagttgttcagtctccacgtggttttggcactcccagaagcagcctcattgtatcccctcagaggccccagccctggccagccagtgatacctcctcaggagtccgtggccacctccatgaagccctcccactgagctcctgggttcccataaccccagcatcttccctatgttctcttaaccctaggaatggtagtttcttcctgccgttactacccttgtgatacctcagtgtcttcttcttttggctttgacagttcaccattacctgtttaaccagttctttatactaaattatctttgttaaaacagctggtgcaatttctgctttcctggctggaccttgactaacagagcacttggtaccaagagtggtcccaggaaacagactctcaaagaagggattctgggattggattggccacatcctcatgcttgactgcagtgcctgtgaaatatggaatacaagcacaggtgtgctgaataccagctggtgagagccagtcacacacacctcttttcaactctgttcagtgacatcccattggcagcctaaaatcagtcatggtgggagtgtttataccatagaaatctgcaaaacctggctgggcatggtggctcacagctgtaatcccagcatgctgggaggctgagtcaggaggatcacttgaggccagaagtttgaggttatgatgagctatgatcataccactgcactctgtcctgggtgacagagtgtgaccctgtctcaaaaaaaaaaaaaaaaaagaaatcaaccaaccaaccaaacaaaaaaacaaagaaaaggaaataaaaggaatctgcaaaaactacagatattatttctccccaagagagccagtttattacacaccagtgattacaagtaatcaatggctcatactgacatcactactaatatcatttgattgtgacaatgttcccactgaagtaagggcatggagagccatgggactgccacacttacatggtagtgatgacttcaggaccatggggtgagatagctatttctgagttcactggagctattatggaaagtaaaggacacgctccaatctttaaactctcagcttaactcacagagaaccagagagattctacagagccctaaaataatcctttatttcttgtagttgtagatttttttttttttttgagatggagttttgctcttgttgcccaggctggtgtgcaatggcatgatctcggcttactgcaacctccgcctcccggattcaagcagttctcctgcctcagtctcccaagtagctgggattacaggcagctcccactacgcccagctaattttttgtatttctagtagagacggggtttcactatgttggccaggttggtcctaaacccctgacctcaagtgatacacccgcctcagcctccccaagtgctgggattacaggcgtgagctatcgcacctggcctagctgtagatttttgaccttgctgaaaattatactcaaactttaattgggtgggctgcaggattacaacataaatggaattcacacatttagcagaatctcaagcagtgtgtttggctgtgtactttgtgtggctgagaaatgaccaagagcacagaggtgcacgggcccctgggtaatggatgatcagggacggagagagcagatgtggatgtgtggtgaggaggtctgggaggaggtactagatacctctcaggatgggtgtgaagacactggtgtctcggccaagcgctgtggctcatgcctgtaatcccagcactttgggaggccaaggcgggtgaatcatgaggtcaggagttcgagaccatcctggccaacatggtaaaaccccgtctctactaaaaatacaaaaaatagccgggcgtggtggtgggcgtctgtaatcccagctacttgggaggctgaggcaggagaattgcttgaacccaggaggtggaggttgcagtgagccgagttcgtgccactgcactccagcctgggcaacagagcaagactccgcctctaaattaaaaaaaaaaagacactggtgtctcatgtgaatgcccactcaaagacatctactgcagcagcaactctattaattgagtggacaagagggcacattctgcagacaacagtcagtctttcccacagctgtgccattgcgtgctcaatgagcttatttatgcagtggccatggtggcaggtgtggaggctctgtatgggcttaggaacatgggcttccccttaccaaagtgacccggcagaagagaccaacactaaagctttgttatggcaccattccctgggggagggcagaggagctgggaaccagtgttaaaaaacctataaatgtggccaggcacagtggctcatgccattaatctcagcactttgggaggctgagacgagcggattgcataaactcaggagctcgagaccagcctgggtaatgtggtgaaatcccatctctacaaaactttcaaacattagccgggtgtggtggtgcctacctgtagtttcagctactcgggaggctgaggtgggaggatggcttgagcccatgaggtagaggctgcagtgagccaacattacaccactaaactccagcctgggcaacagagggagaccttgtctcaaataataattaaaaaaaaagaaaaaacacaacctataactacttggatatgtaaaagaacaaaatagaacttataggcttaaaaaaaaataaacaaaatgaaaaactcctgaaacaggtttatcaatagcctaagagataattagtgactagaagaaagatctgaagaactatccagaacgtggaacataaagaggacagattaagatgtgatagagaggttaatagacatggagaagggcacaagacttttctctttttctttcacaatccacagtaataaatgtattttagttgtgactcactccatagatatgtgtatattaataaatacaactgaaacaaaagattcatgaaataatacaatacactccaatatattatattctcgttctttctcaacactggtaacaatctactacattgattttataagccactgttggaaaacaacctacagtttgaaaaatattagttgaataactactaatcacactacaagatgtaaagagtgagagaacgaggttgagataacatttatttttatttcttctttttttgagacaggatctcactctgttaccccaggctggagtgcaatggtataatggttcactgcagcctccacctcctgggctcaagtcctcccacctcagcctcctgagtaactgggattacaggcatgcaccaccatgcgtggctaatttttttttttttttttttgtattttttgtggagatggggttttaccatgttgcccaagctggtcttgaactcctggattcaagcagtctgcccgccttgacctcctaaattgctgagactacaggcatgaaccactgtgtccatccaagataacatttaacagagatattgtcacgtatgatacaacacggatgaactttggggactttatgctgggcaaaataagccagtcacaaaacgacaagtattgtatgattctgcttacaaaaagtacctagactagtcaaattcacagaggcaggatgtggaatgatggttgccaggggcttaggagagggagcatggggaatgattgcttaaggggtacagagttctagttttgcaagatgaagggagctctagagatggatgatggtgaggtcgcaccacaataggaatcttgttaataccactggatacttaaaaatgatagagagtaaattttatgtgatgtgtatcttaccacaataaaaaagtaaaattaaattgaaaaaaaaaaagtattgtctgagagttttcaagaataatgaaagacaccaatcatcaaattcagaaagcccaaagaactcaaggcaggataaataaaaagataacagcatgagctgggcatggtggctcacgcctgtaatcccaactttttgggaggtcgaggtgggtggattacctgaggtcaggagtttgagaccatctggccaacatggcaaaactctgtctctactgaaaacacaaaaattagctgggcatggtggtgcgtgcctgtaatcccagcgactcaggaggctgaggcaggagaatcgcttgaacatgggaggcggaggttgcagtgagctgagatggcgtcactgcactccagactgggggacagagcgagactccgtctcaaaaaaaaaaaaaaaaaaagatacagcatggtaaaactgtagaacatgagaagagggagaaaagaccaacaacctatgaaggaacgatgttaagattgtcactggactcctgaggagcaatgagggggaacaggcaaacagtggatggcaatcaagtgtgctgagagaggacagctgtcattcaagcaagcaagccaaaatatctgtcaagaacaagggcaaggccaggcgcagtggctcatgcctgtaatcctagcactttggcggctgaagcaggaggatcacttgagcccaggagtttgaaaccagcctgggcaacatagtgagattttacagaaaataaaaaaattagctgggcgtggtggtgcatgcttttagtcccagctacaccggagtctgaggtgggaggattgtttcagcctgggagatacaggttgcagtgagccacgatcatgccactgcactccagcatgggcaacagagcaagacctcatctccaaataaataaataaataaaataaaaacaacaaaaggcaaaaatgaatccatttgcagatgagcagaaactgagaggatttgcaccaacgaagctacaaaaaaataaaatttaaaggatttacctcaggcaaaaggagagtgatcctgttggtgaaagctgagatgcaagaagaaaaggtggataaaaatggtaattgtgtggctgaatctaaactaatgttgactgaataaaacaatttagtaatgtctcttggggttacagtggcaaaggttaaacttaacatacactacattaaggtgtataatttagaggatgggtgattaaagtactccaaagtctttatattttaaggaaacagggtaaagacatttttacaaatatttaaagatattggactttcacaaggtaagtatgcatgcccaaaagtttgaagtaaccactaaaacttagaaatagagtatacaggtgaagaaaatcagaatgagaataaaaataaaccctaaagaagaaaggaaaggggaaaaaaaccaggcaggacaaatagaaataacaaaatacaatggtagaaataattccagatatatcagtaaatataataaatgtaaatggactaaatgctccagttaaaatacaaagactattcttttaaaaaacctttttatcatgaaaaatttcaagtatacagcaaagtgggagaaacagtacaagaaaaccatatacctgcgatgtagagtcagccattgctagcaatttgccacatttgtctcacctatatgggtatgtataggagactattaagaacacctatttaacttccatagtaaacataatataatgaaatacaatttaaacggtaatcatgatgtagagtatccacttttgaggtcaagcagatctggattctccagcaatttttaattatttaacttacgtgtgtggttatttattcaaaagatgtctcttcactaggctatagtaaaaggattggaatcaggttcgcttttctgatcattgtatttctaaatatttgttgcataaacaaatagaatttactagtaaagaattcagcacagtgccagttgcatagtaaacatttaacgtagagtagcttgtatttattgtagttgctgttgttattggaagcattcagtagagtgatacaaaataaataagcaataattggtagtttattatatttataattattatttacaagacgtcacagtgcctagcccatatcactcacccataaacattatacttatactaagtactttcactattattcaaagtctctaacagtgcctggcactacataagcaagagaaaagtggaagtttattctaattgttattattgaataaagcacttaacacgaagctggcccccagcgggcccttaatagtttccgcggtggctgtcgtagctggactacagaccccgcctcctgagcggcccgaagccccgccccttactgccccgcagtcccgcccccgtggcttgtgccgcgcctgcgcactgtcccggaaggggctctacgcgcgcagctttagtccccgcccctggagccggcggcgcagggcgcagcttcccgccgccagagcgggccagcctgctgcgtgcgtgcgtgtgtacgactctgcgtgcgtgcgtgcgtgcgtgcgtgccgtcagctcgccgggcaccgcggcctcgccctcgccctccgcccctgcgcctgcaccgcgtagaccgacccccccccagcgcgcccacccggtagaggacccccgcccgtgccccgaccggtccccgcctttttgtaaaacttaaagcgggcgcagcattaacgcttcccgccccggtgacctctcaggggtctccccgccaaaggtgctccgccgctaaggaacatggcgaaggtggagcaggtcctgagcctcgagccgcagcacgagctcaaattccgaggtaagccccagaggccgccaccttcctgcccgcggcctccgccccagtgctggaaggacggagcccggcgcggcgggtgacgtcggccctcgtccccaccccgacggcgctgtcgcggggggcggcgaggccgggccgggccttggcgctcgccgcgctccccagaactgcccggagtggccgggacccgagagggctggtgcgggagccggggcctgcgcctcctccccgacccccagcctcctgggacttgccttcgaggcacttgtcactttgtaacttaccagtttgtgatcctctctagtgtgagcctccgccgctgcctttgcctagaagtttcttcccctgctccgtgacagtgttgacctcagggcttagttgaggtgtcagctgctcagagaggcctgctgtgaccacccagccaccgtgcacacctgctgtcattccctattccgtcactgtttcgtggtcagcacggcacttttcatacccaaaatcactgtttcaatactagaagggaaactgcatgaggacaggctcttgtcagttcgctgctgtgtacccagcacacattatacgcctagtaaataaatacctgttgaaccaacagatgaacatgttgaaccaacaaatgaacctcctcaggacttctgatgggattgggcccattttcctttcactgcgtccctcatgctgtctcctggttgcggtgcaaggaggctgccacggtgctgggatcctttttctccgcagagctgtctggagcaacacctgcggcgatgggaagccatgaccctggtttctcccagatactattacctctgtaatttgtgcctttatgttttctatgttgttacttttgttttttttttttttttcctaccttcaccagggccacgaggtaaaagttcttgtctgacatgctcattctttctttttgcgtgtatccagtgatgtgggaggctctggggaggtgatggatgcacaagacagataaggcctctgctctcacagagcttaccttccgacgaggacagacaaaccaacacacaagatcattgcagatagtgctaagtgctgtgtaggaaatggaacagtctgactccatggaagcgtactttagattggaaggccgggtctccactatatcgctagcaccggactcacagtagatgctcagttggtatttatgaatgaatgaatggccagaggctctccagtttatatgtcctattgggaagtagtgtagggtaacttacccaaagttacccagttggcaaatggtacatttgaacccagacttcagagttcacgctcttaaccgttttgctgtctgatcgctgggaaatactccagaacggtggctgtcactttgccttccaagttaacaatgtgaaataactctgaatttacagagaaccaaaggctttccaattaaaatgaaaaaaccgaaaaaccccaccaaacctaccgtggattgtaattccaggatagtacttgagctttcatgatgttctcatggccttctggggatgccagattgggaaagaagtccaggtagctaaagtgaaaatagtgagccttagtttccacttgagttgtctgaagttctttctctatctgggaggcctggcttggcttctcctgataattggtgggttcattcggttagtccacaaacatttactgagtacctgatctgtgtgtcagatacccagagaagccaagttatatcagctgtactctcctattttccctcaacctcctcccagtactttagggaagggggcagatgagaataacagccaggacaggacaatgatgtagggtagtccagagtgctccaggagcattgaggaggtcaactcctgaaagaggtgtcatttgagctcagttataaaggtcgagtagaagaaggctcaaagaaggaaagggtggggaacatttcagacagaggaaattgcatgcacagaggcacaaacactgagatgactgggctcctttgggatgccactagtagtttttttttttttgagatagagttctcactctgtcacccaggctggagtgcagaggcgccatctcactgcagcctctgcctcccaggttcaagtgattctcctgcctcagcctcttgagtagctgggattacatacaggcatgtgccactacgcctggctaaattttgtatttttagtagagacggtgtttcactatgttggccaggctggtctcaaactccggacctcaagtgatccgccctccttggcctctcaaagtgctgggattacaggcgtgagcccggccaccactagtggttctgaatgacagcaacaaagaacatttgttgtggttgcctggcaagatgggagacaaggctggtgagtagacaagagtcagatctcagtccctttatgcatagatgcagccagtgtccaagttaaaattgtgttgcttctccttgagcagtccttccttgcattaactttctgaaaacccccaaatcccagtacaaactctgttgtctaatatgttatggaaagaggcactcatttgagaaaatttaagattttgttcaattgttttactgaaagatgtgtgaccttaggccacttcactcctcaaagcctggggtggttattcggtcaatggggatgatgctcgtgtccacgttgcctcttgtagaacgtgtttagaaggaatgacatggctgttagtggctttgtaagtgcatagtactatacagagattagacaaccacttaactacttaagtggtttcatcacttctgtacctgaaaggtgtggcagagaatagcgatcattctggccctggattggccaaagtaattatgccaaagtcactggatatttttgctagggaagtggtccaagagaagtggtaccaaattgttgaaggcctctggctcataactttagaagagacatctgtgtgtgttcttaaatgacgtcatgaggtgtgttgtttgtttgttttaaactgaatgctaagacagtacaattaatagagactgaataccctgacttagagataattcatttcaggatgagaaatggcacatttaactggtttcttccaggttactcagggtgacgactctgatttctggtcgttcacctagatgaacctctgagctaactttacttgagaaggtaataactaaaatgcccattcaaaggaaaaattatcttttaaatgcagcctaagttgatcgtatgggattgtatattgtcagactctttaatcttgggaattttgtgtggtatgttaaatttaaggatgttacagaagaaaaagaatgcaaatttatatgactttatgcagttttataggaagtactatgctgcatcataaatatcaaaaggagaaagcctggtggcttcctgaaagaagcatgacacaggaggatttgcctagacttaaggttgactttcatgagatatttttagtaagtgaacattaagctctttcagactaggggtatctttctgagagagtaaatgtttttgttttttggcagggtcttgctctgtcacccaggctggagggcagtggtgccatcatagctcactgtagcctcaaactcctgggctcaagagatcctcctgctttaggttccctggtagctaggactacagatgccaccattcctggctaatttttaaatttttttgtaaagatagagtcttgccatgttgcccaggctggtcttgaattcctggcctcaagcagtcctcccgcctcagccttccaaagtgctgggattacaggcatgagccactgcatgcagcctaagtgtgtgttttcttttatatttctttttgtctttttcactaagtcataggagttttttaaaattgtcactctttctgttgatctcagttcttccaagtcctaatcgtttccttgccatctcctcactctgagatcccacttgttgtccagctcaaagagagctttccgaatgagtcactttcaaggcattatatagcactcttctttcattcccttctccctccccttccatgagagtccatctgtggtaaatagtatgtcatatattttttggtcgttcaggactctagatcattccttacatcctagcccattcccccagcaatgatactgtcacatggaaatggtctgttgaacatccatcctcactaggttaaggtttgttttgttttgttttgttttgttttgttttttttgagatggagtttggctcttgttgctcaggctggagtgcaatggcgcgatcttggctcaccgcaacctccgcctcccgggttcaagcacttctcctgcctcagcctcccgagtagctgggattacaggcatgcgccaccatgcccggctaattttgtactttcaatagagacagggtttctccctgttggtcaggctggtctcgaactcccgacctcaggtgatccacccacctcggcctcccaaagtgctgggatgataggtgtgcgccactgcacccagccggttaaggtttaaacataactgtggatgcatttacttttgctttattgcttgactgaaccaatgaccttcaagaagtcttagatagtcctgccattagtagggatctcagatgggagggcaccaatgaatcagtgtagttgagtaccacttttgggagaaaatagaaacttggacactctaaatgatagtttaaggacgttgtttgttttgttttgttttttgtatgggaaaagttggcttagactctttagttcagcccttcaagttgatgtgtaatttaagattgtttaggaagttaaaaaatctaaagccctgtggatatagttcattcagtgcagtaattatctttcagatgccaagtacagcattaattctttagctttagcatggcactgattttcttaacacttcatgatcacgtggagcagactgtgctttacagcacaacagagcgtcagccatgtgctgaagattcttcgtggtagtggtttagatccaccctgaatagattatcttcatttatttaattattaagtagcttgcttatcaaaagcggcattaaacttactaaacttgagtcaaacgtaaatcttcatagatagtaccatttacttctgaaatcttgttcctgggagaaaaatgtggactggaagttaactttcttttatccacctattcactcctttttcttcacagttaactccttaggggaaaaaatgtatagttcttgaccatgtgcttatgtttgtaaagcaatgatgtttccttaacgtgagtggttgtgacatagatcactgttatcttcataattacctgggagcttttcatccaagtgtggatttactaaaataattagtctgaattgatgcttattaaagagctgaactcttaaacgttaacactatcttgtatttattaaaattgtatgcatgtttccttcaaatgctgaaggcagaatactgagaactttgaccctgtgttattatcgctaagtagttgaaaattaggggaggagtcaagggagtatattatattggttatcactcaaatactacccctaggcatgatttttagaaccgaaacttgaatttttacataaagaattatctccaaaagtgtcttttttttttttttttttgagatggagtcttgctctgttgccaggctggagtgcaatggcactatctcggctcactgcaacctccgcctcctgggttcaaacgattctcctgcctcagcctcccgagtagctgggactacaggcacatgccaccatgcctagctaatttttgtatttttaatagagacggggtttcaccatgttggccagatggtctcgatctcttgacctcgtgatccgcccacctcggcctcccaaagtgctgggattacagacatgagcctctgcgccaggccaagagtgtcttatatatccccacttttttgaaaaatttgctgtctaaaggatgatcatgatttgggacgaatgagcacagctttcaactagatgacaagaaagatgaatacaaagagtgctgagttccattagtcaagacaaggttgccatagaatgtctttaataaaataaaacaaaagccttttgcgttattttgcaccgaggattgtgttaaaaacaaagttgcattatggtttccagattggcatccttgtttttttctatcattttaggcccctttcaggctgttatcagcatagcatatccaggattgctttggccttgctcagtgggtatgtgcgttctttgaagttcttacctgacagatgtgggcagctggctttacacaaggaagagttgtttaaagagctttggtatggaaacaaagttactaaacttgacagtcacttgaggattatttaaaaaacaaacaaaataactgaatgtggtaaaatactatctctagaatatttttcaaactgttaaatgcatccttttaacagaagctgttgatgtctacaaacactgtctttgtagacaaagacaaaccccccttgcatgggggtttgggggttgggaagcagttgagaaaatggcatagtcccgtgagaaaaccttggaatactttcttttaataacatttttttattgcatagaactgtaaagctacagaaatgctttcttggagttttccttcatcctttcagaagggctaatattgacctttggttagcatgttagtattttcacctgtgtcaagtgatgtcttcacgcttttggggggtgtgtgtgtgcatgcccacctcgtgttgtgtagggcacattggccgatacctataatgtgtttcaattactacattgttggcatttcagtaggctccttcagcctttgcccatctgggaagtggagactagggcaataaatgttttaggggtagattgagactgcagtgtttttcatcttttagcttgtactttaagacaatgggatgtacccctagaccatttacctagatttaaattacttccttgtgatgtggtttagagctctaagttccttgagttgtcttgaaaggctgaagggtgctcagagaatggaggggaattgaaaatggaacctaaggatctgggagtggtcatatgtgtgagtggtgaaatgtgccccccaacaccccgttgggtcgggtctggagttaaaagcagtggctgacatacattttgcaatataagggtaaagaaaggtaaagaaggaacaaacatttctagaggataaatgctttaattccagaagataggccacacagtttaggaactgtggtaagaggtgctttgccatatttatgttactgtttaatctgtgtaacaatcgtatgagatgacttagtcagtggctaggtaactttctgctggatgaggctgcactagtaaatggtggcacaggcaaagccttgtactttccctcataccagtatcagctcattagagttaactcataaaggggtttgttcttgagagagggaggcagagaatttaaaaccattaatgaagtattaatagctgtcaggacaatttcttaagaacatcaattcattaagagttattctctgaattttttaggagggatttcttgccctacttttgaaaaagttcagacagatgactccaaagaatgtttgatttctcttgtgaatattcacttttatatcagattctgatggtttcttgattctatatatttagaaagcattcggccgggcatggtggctcatgcctgtaatcccagcacgttgggaggctgaggcaggcagatcaactgaggtcaggagttcgagaccagcctgaccaacatggagaaaccccatctctactaaaaatacaaaattagccgggcatggtagcgcatgcctgtaatcccagctacttgggaggctgaggcaggagaatcgcttgaacctggaagacggaggttgcggtgagccgagatcccgccatcgcactccagcctgggcaacaagagcaaaactctgtctcaaaaaaaaaaaaaaacaaaacacattaacttgtgggtaatttgtccttctgctatccagtctttggaaggcagggcaaagcttgtgtgtggtagagatttcataggcttgcaggtttgtagagtgggaattcaagaagttgtaaagggcacttattaagataggaatgtctaaaataaatgatctttagcagtgccaccttaaactttgtaagtgttgctacaaaacctttagttctgcatgctcctgaccagccattgccttggacagagaaacaaataagggtgagttaataaactagagacttgtctcaattgttcaaagaggtaaacttaaggtgattaaaaagtgctgttttattctgtatgagatacactttgggaagtcgtcattttccaagacgatgatacgccaggcatacgaattggatcagaaaggatttagagacatgcatggatataatgatctcttacagatgttcctcaccttacagcggagttacatcctcagaaacccattgtcagttgaaaatattataagttgaaaacatattagatacagcttaacctacccaacatcatagccttgtctaccttaaacatactcagaacccttaagttagcctccagttgcacaaagtcatctagcacaaagcctattgtatgataaagtattgaatatctcatgtactgcatattactagcctgggaagagatcaaaattcaaaatatgtcaaaattatgatggcttcacaccattgtaaaattgaaaaatcgcaagtcaaaccaatcggggattgtctgtacataagagatgattgtccaaattagagctgttttgggtttctgccctttgcagatcctttgaggttttctttatagacagatgactccttctgggggaattgagcgtgactctgattgagatttggttcagttaccacatactgaaagcttcctgtgggccaggcactaggttgcactggggacctgggaggaaggcctagcccttaaagtttccagcctctaggtattgggagacgagggaaaatggggacaagatatttatggcctgtccttattgagagcttagaaaaagctgtgttaattctgctttgggtgttcgatctcacagggaagatggcatttgagatatgtgacttggcgagcttacactgtgcgcttgccatttttctaagcgttcatttatttaattcttaatgcaagcctaggaagtgggtacagttatgatcctgaagttattaacccaagttatgaacctgactgagggttggagctgggatttgaatcaagatctgtctgattgcaaaggctatggctttttttttttttgtcgtcatgctggctgtgtttcttcccttaaaagataagtgggagtgtgcccttggctttcttatttattatgttaggaagatgagaggaggagtgagactagagaaagaggcttgaaagagaaatgggatagaaaaataaaggaaaaggctgggcacagtggctcacacctgtaatcccagcactttgggagtctgaggtgggtggatcacctgaggtcaggagttcgagaccagcgtgaccaacatagtgaaaccccatctctactaaaaatacaaaagttagccgggcgtggtggtgcatgcctgtaatccaggtactggggaggctgaggcaggagaaccgcttcagctggggaggtggaggttgcagtgagccgagatcgtgccattgtactccagcctgggcaacaagagcaaaactccgtctcaaaaaaaaaaaagagagaaaaagaaagaaaaagtgccttattataattgtagtcttgtaattgtctcgttggcacctcttacataaagtgcagttgctctgggacattagaatgactgtgactgacttttaatctttgccagccatggtggctcacgcctgtaattccagctttgggaggctggggtgggtggatcgcttgagctcaggagtttgacaccagcctggtcaacatggtgaaacccctctttactaaaaatacaaaagttaaccaggcttggtggtgtatgcctgtaatcccagctaatccggaggctgaggggcaggaatcgcttgaacccaggagggcagaggttgcagctagctgagattgtgcctctgcactccagcctgggctgagagtgagaccgtctcaaaaaaaaaaaaaaaaaaatccttctatgaattctgtgtttccccctaagaacttctgtcctaacttgatcacttcttattgtgagctatttgtttattagtgttgaaaattctgtgctaatactatcaactgtaccttcccttccaccaccccactctctgctccaagtctttcatgtcctcaatacctgtcgtgcaaactatgcatttctgggttaactgggtactattttagtcttttagttccatcactcagcatttacaatatagtagaaaaatggaagaaatggaaaggtacgtactcgagaaatcagtgttatggccatctccattttagagatgagaggcctttgcagaaggcctttgcgaagactttacagaatgtgaatttgtacccgggtcttacagcctcccaagcctgtgtgctttgcattacaaagcgaatctgtggttcctagcattgctgtcacctagaggcacttgggctaacctccttagctttggtttcctcctctgcgatgtaaggaggcttgaactcagtacctctaggtggtccttccagctctaagcttgagaacttaagtttattttagctgaagaagagagatagaaagccccttgaggacaggaaccagcttgtatttcccacagcacctactggtactttgttcctatgggctcctgaatatttaattaatgaaacctcttgttactgtttgaaagctcactacttgtattaacctttcctgagtattcttggactctgatccagttttttctatatcacctcttattgtacgaattgtatgtcactttcacgttttgttttattctttatgtgcttcatttacttatttattgcttggctttcactgctagaatgtaagctcctataggtttttgttttagtatttctgagtagactacatagactacattctcttcttcttcttgttttcttttccgagtaccccaaagaaggatacaaccctggatttggtcatcttttcagtgtttgctatgatcatttgaaacagaagcatacacaagaataaaaagagaaatttgctgaaaaaccagaggtttgtccttgtggaggcttatttgaattctcaatctgttggttgaattgatttgttggcatgtaaatatatcctgatggactcctctgaaaatctaaatttgtgcttctgacctttgtaaagtcaggcagtgctttactaattggatgaaggagagccatggcttactcttgagagaatgtgcagatgcacacaatcaaaacttttcatgtaatttgcgggcaggaggatcccatcttagtgcatagttcacctctaacctcgctcagagaaaaggtggaagaagcatgagcagtcatctagagaaatccagagaccacttggtcggctcatttgtatctttttatttattattatttttaaaatgaatgcttttgttgcctttctcttccaaagcaagattgtttctttttctttctttacatacctagcactcactgagaatagtgcttggccattagtcattttcattaaacatttgagtattgtcccttccacctttaaagaagaaaaactgtgttgtcagtcctttttaccctgtctagctactcctttcactttccttcttatcatggtaagcttctggaaaacatagtttcctgtcttttttctttctgttcttcacttctagtcactgcccgggagctcaatcattgcttcatcactacatctcccattgcatgttcagtcttcactaccatttgacccctgttgtcatcctgctcattgacactcttctcttgacctctctcattgctctctctgcttttcttccgcccatgtggccagttttgcccactcatcatgcagtccggttggtaatgctcagggttacaggttcaccttctccccctcttctcctttccctgtttctctcagatttgctctctctgtgtcttcccttctcccctttgcggaactcttttaccagtacccttcgcttctaacgtcacttatgtatgaacccaggcctgacccaagcccatataaaaggctgcaatacgttaaatgcagcatgacccaagctgaactctataccaccttttcattttttcctccaaacctccccttcttactgtctcattggatggtacctacattcatgcatttgaccaactcagagagtctatgactcagttctgtcccttcttccccattccctctatggctgccccattttctcccgcaactgtaatagcctcttaactggtcttcttgtccgagtcttctctttctttccaccctgatgtggttttcaaagatggtttgcaaagatgcaaatctgagcatatctcttgcttgcttacaatcattaaatgtcttcctgttgccaaaaataaagtttaaattctttaacaaaacctggaaaattatcgatacttgttgcactccccccacattgccctgcccatctttccagcatcgtctttcctcatgcttgtgtttcagccttttagttctccttggccatggggctttggcatactatgtatcatgacttaccctgtatgtagtcataaagtaacagtttttagctgtttccaccactaaaaattagttgattccttttcctcttgtttgtttcactgcgtccccctgcttacctttgaggctcagcacaggcttcacttcttcaaggtaactgtcctgacattcttcactcacattgtatctgttcctctggctcccacacatgtcacagcatgttgtcattggcaacgtgatacgtgactccctttcgctgttagtcagcaagcccccccaccctttttttttttttttttttagattgtgtctcttctccccacatcccagtgcctagcacagcacagtgcatggtgcatggcagtttctcagggagttcatggtctctgggtctaaggcataggcgaggaagggttggtgtttaggagaaagctgagaaagatgccaggcgcaatggctcacacctgtaatccaaggattttgggactccgaggcaagcgaatcagttgaggccaggaatttgagatgagcctgggcaatatggcgaaaccccatctctactaaaaatacagaaattaacctggtgtggtggtgcatgcccataatcccagctactcgggaggctgaggcatgagaatcacttgaactcaggaggtggaagctgcagtgagtcaaaattatgccactgcactccactctgggtgacagagcaagactgtatctcaaaaacaaaaacaaagctgagaaaggagagaggggggaagaaagaagactttcagtggtgaagagtaatgaagcctgtcggcagggcccgttatgtacagccgatcgatgtagacacagtgcattttgctcagaaaatatttgaagattttccactaaatgctggttgcttttctctcttgtggaaacttatgtttttacttctcctcctcttctatttcagagagtcaggactacctcttaggtgtgtgttcttttaccccattcctttcccatcacttaacagtattttgcatcgttagcctattactgctgtctcacttttctcttgtacttgattccttccttgtgcctacaaacatgcttaagttgccccttcctaaaaagaaatcttgttttctagatcttccccgcttaagcaaatgcccagtcttctatcacagctaattttggggaagcggtgaatctcagtttctggtatctttactcttctttcatcagacctcaccccttcactcaaacccttcttagttcccccaggtttctctctgtgatacttgtctttgacttttctgatgaactgtccacctctttatcatctcttttactggatgttgaggtttctcaggttctggcttcagtcttctcaatttaacaattctctgtatgttgtctcattaataatgccttcatcttccacttctgcacagaaaacttccaaatctctatctccaagcaaatcttttgatctgtcagcctgctggacatccctgtctatctggttgtcatgagaacacctcaaactcagcatgttccacactgtatttaccgtttaccttctcatccccactgactgtggcttctggatcttgggaatggcccttgcaccaagttggcaagctggaaatcctaaacttgtctttcactccccattttccgtaacctttcacatctactcagtccatttaaatcagcagcatctcctatgcccttttgcttcttagtattctatcgtatcctaagtataggtcctttcccttccagactattgtagtagcaccgtgactcaactttctgtctctattttttctgcctgcttctctcaccctttggactatactttatacagtttccagagatatttttctaaaaattgaaatttgatatcatttcttggtttaaaaacattcattggctctctagatcttacggataggttcgtggcccaaattcttaggccagcagcaaaactcttcagagtcaggccacaccgcatctttccagcctcagcttctttcacccctctcgtaccccttcctcttcagccatttgatgcccccagaagccccttatagcgttatcacactgtactttcacccaagttccctacagctcaaagtgtactttgcgttatctgcttttcagactccagggcttgcctcagtgatcagttccctgtgctcctcaccctccccttttgataggatgctttatagattacctttcatacagtgttcgatgcagttagaggtagtatactgcccaggagttaagagtgtgaaccctagatttgccatctgaaagtcatgtgtccttcagtgatgcatttaacctctctgtgcctcaaatttctccctctggggtatgttaggagtatacaaattaacacatgtaaagtgcttagaatagattggtactgttaaatatgagctaacgtcacatttgatatttttttaaaaagaaaaaatcattatggagtctcagtcctagagattctgattcattaattctggatgggccccaagattgttctgtgtattctgggtgggagctgcagtgccctgtttctctctctagcttgagagcctagcacagcacctgaaccattctcttcatgggttacttattgagtacctgtagtgtgccaagcattgctgagaggccgagatgagaaaacttttaccttgtggagctcatcttctagtggagaaggtgtacattaaataaaaacagaaaatatatatgatgtggtgtcaggcagtaggtgataaatgggaaaaaaacaactaaaaacaatgcaagataaagggatttgggaatggattcaattttaagtagggtaattagggaaggtcatttaagtagggtgattagggaaggtcatttacctgaggaggtgatatttgaactgagacctatataaaatgagtgtatgaactgtggagacatttgggaagagcattacagacagatggaagggcaggtgcaaggtgatgatgagcttggtgtgttcaaggagcagcaaggtatgcctgtgctagagtggtggaggggcctgcggggagatgagctcaaagaagagggcaggagccttgccggtaggcaggccacaggagggactttggattttgttgtgagatgggaagccacagaggaatctgagcaggagtttatttttatttttatttttatttttggagacagagtcttgctctgtcgcccaggctggagtgtagtggcgcgatctcggttcactgcaacctctgtctcccgggttcaagcaattctcttgcctcagcctcctgagtagctgggattatgcccagctaatttttttatttttagtagacagggtttcaccatgttgcccaggctggtcttgaactcctaaactcctgagctcaggcctcccaaaatgctaggattacaggtgtgagccatcacgcctggccaggagccttttttttttttttttttttttttttgagacggagactggctctgttgcccaggctggagtgcagtggtgcgatctcactcggctcactgtaacctccccctcccagttcaagcaattctcctgcctcagcttcccaagtagctgggactacaggcatgtgccaccacgcctaagtaatttttgtatctttagtggagacagggtttctagattaaatgtagaggaatatagaggaatgtagattaaatgtagaggaagagagactgcttttggcctaagcagttgggtgagtggtggtttctttactgagatgagaagcattgagtttgagggaggagagtgggactcaagagtgccgtttggacatgagaaacttgagatgctcagtacacttgcaacgagagatgttaaataggtagttgagtctggagctcaggggagagggccaggctgcagatataaatttggcagtcagcttattgttgtgacatagaacagtaaggagtaatttcttctgattaaagagatttggtaaacctttccaaaagagaagacgtttgagcaaaactttgaagaatgagcataatttccaaaggcagagtaagggaaaaatagaaaatatttttcatccaagtctcacagcctttcccctggcctcttcttgagtttaagaagctgctgacctggttgataatctcttatcactggtatagccacttaggttctttattgaaaaggaaccagaacagattacacactaactgataaaccacgttctactgtttctcatcgttcacagattgaaaattccagttggatcatcaaggtgcagaatgctaaacttgttcttctcccctgttctgtatctggtgtgaattggatgtgttgattttcgtatggaggctttttcacatgctgtcatctccactaaagatggaacactttggagaagttttacttctgttgttaatgactttttgcacttgaactgttaaaacaactacaaccatgagaaattgggaccccatgctattttatcactcatacccctaacttgagcatattatctgtcttgactcatcctgctttgtgtaaaatgtgaatcatgttttgtcactcttctatttagatagaattttatttgcagtagaatattgcttatctttttgtttatttttgtgattactgtaatcagaaattttggtctttcaagtagagaataattactagatgttcgttagtcaatgggataaagaatgcattgaaaaaattcagtttattaaatcgtctaagatccttttagaactgatgtaaaattcatctgtgaataatcttctactgcacgataatattagtgctggatatagatagaatgtatgaagcctcagctcttatatactccttttagccatttttctattacgaaaaaaaatctagtgtattaaaggaaagtagtgacagtatttatctttagatggtttctagtatttgaagttcatacagaagcttttgtcagaattgtacacatgggtctttgtcttgagttaatgagaccactgcaactttaaacatgttttgagtgataaccttgatttttataaattatacaagcatgactatcaaggctggtttatcagttttcaacaactttacaagtctgaacaagtagaaaattatttcaaaagaaccttgtttggatctcacataaactacaggtagctttctgtatatgaaaaaatttttaagtacagaaaaatacagataatataaataccccagtatggagtaactaaatgttaataatttgttagaagactcgttttaaatctttctttaataaaacaagtaaaacttcactaataatttatggcatgtctgtactccatatctgctgattcatacgccctccttttttttttgttttttttttaactccccggaggaatttaatgtgaactatttccgtttttttctagatcacttaatgtagtgtcatggtgtatggatgacttaacatgtttttgagacctatcaactgttgaaatacagatctagttcattcttttaaagagttgtatagtattccttcatgagattttagaatttttattgtaagtaagagaattctttatatattttcaattctggccattcatctgttatataaactgcaaatatcttagttttccaggctgttccttactaactttgtattttttttcaggtagctttcctgagtttgatcttaggaattcttaaaatacagtagcatgtcttccagtttagttttcccacccatggaggtggtggcaggctgagttttgtttctttctgctctgaaagacctaggaaactagtgaattgagtaagcaccctgcaagtctggtatagtctatttcaatcaagttggcttctggtgtgcctttgatggcatcatcagtgagagttcttggtgttgatttctcttgctgcaataacaggtgtgatgtttctcagtagctggctggctcccgaggataccaggagaatactttattaatttaaaacactgcattctaagagttcttcaggaaagttatgtgtctatgggtagggttgtttttatgtggttatttcaaaataagagctatacaatcaggctttctgctggaatattggaatataatgtctgccatttaaacacattggttgcaaagctttaaagctttatttttgtttctaaagcattgatttaatgtgtgagctaacaattcgatcaagaaaatagatttttaagaaaacttctccagtgtccttattcttgagttcatggttatttaacagctcactctcttcgaatatctgttagtatggtatctttcattttttagggagggggcaactttaaaaaaaaacaccatagaataattatgatgaaagcattattgacacagtgagcatttttaataccttcaacctgtatataagcagcacaaatttagagtgatttcagatccgggttttgaagtaggtgtctgtttacaggaaatgcagcagaatcagagtacaatgacctctgaggaagtctcgtattcatgcagcatacatttttactatgtttgtggcactgttctagtttggaggatctggtgatgaataggacagacaccccccccccccaccccgccccccactccatgtggaaacaggaaaggaacaaacaaaatatgtcctatgcagaagatgaaaagggtgtaatgctggaacaggagcagcagtagtctcagtatttattcacccagagcctggatgtgcttacagagggtgcatagaggaagaatacagccattgtgtgaagtagatggaagcatggcatggctatttgttcattcagcaaatatattattgagcatctgttctatgcctgcaagtgctctaggtgctgatgatcagtaatgaacaagagggacaaaaaagtctgtgttgatggagtttccattctagaaggggaagatttacataaacaagaaaagaaataatgtggggattggtgcactgcagatgggtatagaacgcagaaagcaataggatactttttaatgtaaatagactgtcaaagggtaaaatttaaaaatattaataagatatccaacagattttgctttagaatgtccgtgtccctccattttagtgtatttttcccacatagagagtctactgtattgaaacctcaagcacacttttattgtcttaacaaaatccatcaaaagtcataggcttctggagacagattattaccttcccagaaggtaatctttttagagttgaagtgaaatatggtaatttgttttttggagaggctgtgaaaaggagagatactgtacctaatttgtgtttgcaagagtataaaataatatagctttttttatgcagagtggaaaaaactgttgtgaagctaataactttaaacttgtatctggaaagctgagacctgatagattatatatcaaattggtatacaacttatttggtaacatatataggttgagtttcaaagtattgtagctacatcagaagataaataacaaaggaaggatatgtatttgtgaaaccagaatttcatgaactctagaaaaggaagaggagcaatcactttgcacaacaaagaatctttattcatatacacacacacacacacacacacacacacacaatacagatagatattttcaaaatctcaataatatttaatattagaaatgttaagggggatactaccgaaagtgaattaatataaaagaccaaatgctttttccccttcctttttttaaaaaaaatatagtttagaacagttttaggttcacacaaaaactgagcagaaagtatgcacagagttctcttgtaactcctaccccacacatgcatcataaccccctccactgccaacatcctacactgagaggtacattggttaccattggtgaacctacattgacatgtcattgttagccagagtccgtagtctgcgttagtattcatttctagtgttgtacattctgtgagtttttacaaatgtataatgacatgtatccaccattataatatcagagtagtttcagttttactgtcctaaaactgctctatgctccttgtgttctttcctcccttaaattttatcaacaccgtatttatttatttatttatttattttgataacagagtcttgctccatcacacaggctggagtgcagtggagcgatcttcgctcactgtaaccttcgcctcctgggttcaaactgttctcctgcctcagccccccgagttgctgggattacaggtgtgtgcccccacacctagccaatttttgtagttttattagagatgtggtttcaccatactggccaggctggtctcgaactcctgatgtcaagtgatccgcccccccgccccactcagcctcccaaagtgctggattataggcgtgagccaccatgcctggccaacaccttatctttttattgtctctgtagttttgccttttccagaatgtcatagagtaaaatcatacagtatgctaccttttcatactgactgctttcactcaggaatatgcatttaaggctcctccgtgtcttttcatggctttatagctcatttctttttagcactgagcactatttcagtgtctggatataccacagtttattttatccactcacaaaatgcttctgcattttggcagttatgaataaagctgctataaacatccatgtgcaggtgtttgtgtggatataagttttcaacttacttgggtaaataccaaggagggtgattgctggattgtatggtaagaatatgtttagttttgtaagaaactgctaaatggtctttcaaagtgtctgtgcaccgtttttcattcccaccagcagtgaatgagagttcctgttgttccacatcctcaccaacacttggtattggtagtattttagaatttggccattctaaaactcaacaataagaaaatgaacaaatgtgtaatagtatctcattggacatcttttctatttttgtttttctgagatggagtcttactctgtcgcccaggctgaagtgcagtggcacagtcttggctcactgcaacctctgcctcccgggttcaagtgatcctcctgcctcagcctccccagtagctgggactacaggcatgggccaccacacctggctactttttgtattttcagtagagacagggtttcaccatgttggccaagctggtctcgaattcctgacctcagctgatccacccgccttggcctcctgattacaggcgtgagccaccgcacccggccagacatcttttcgtatgtttatttgctttctgtacgtttttggtgaggtggctgttcagatcttttgcccattttaaaattaggttgttcattttattttattttatttttattattttttgagacggagtctctttcgctctgtcacccagactggagtgcagtggcacgatctcagcacattggaagctccgcctccctggttcaggccattcccctgcctcagcctccagagtagctgggactacaggtgcccaccaccacgcccggctaatttttttgtatttttagtagagacggggtttcaccgtgttagccaggatggtctcgatctcctgacgttgtgatccacccgccacagcctcccaaagtgctgggattacaggcatgagccactgtgcccagccttcattttcatattattgagttttaagagttctttgtatagtttggttgacagtattttattcaggtatgtttttagcaaatattttctcctggcttgtggcttgtcttctgcagaacagatgtttttatttttaatgaagtctagctaatcagttatttttttcatggattttgttttggtgttgtaagtagtcatctccaaatccaaggccatctagattttattctgtcatcctgtaggagttttatagtttggggtctaaatatactttagcctttatttttctggtagaattgctaagttaaaagtaaaattatggctgggcgtggaggctcacacctctaatcccagcactttgggatgccaaggtgggtggatcatttgaggtcaggagtttgagaccaccctagccaatgtagtaaaaccctgtctctattaaaaatacaaaaattagccaggtgtggcatatgcctgtggtcctagctacttgggaggttggggcatgagaatcgcttgaacctgggaggtggaggttgcagtgagccaagatcgtgccactgcactccagcctgggtgacagagtgagactctgtctcaaaaaaaaaaaaaaggtaaaattatatatttactccttaaaaacttctatcttgccatttagtagataggatgttatgctatgcttgaggtaatacagataggtaaggcctagattgagttttcagttcactggaaattttcattattactttttataatttgatgggacatgaacttttaaattattcttttgtaaagatagtatttacatttcctgaagggaagcgttttaatttttcttccatggctcttgaatgaataattacagaaaagcatttaaatcatatgtagatcaggagactgtttaaagatttaatggaatacttttcccataaaatgctcttaggtttcctgacaagtttattcagccatttttttatgacattttcaacacctggaacctgacctcttcatgttgtgctggattgtgacggtctttgaccttcaaaccagaactttatacatcttaaggcccaatttttgtaattaagagtaaaaagcaactatttcttctttcacttttaatggtatgcaagtttttgctggtattgtatttgccttcttttttttttttttttaatttattttttattgataattcttgggtgtttctcacagagggggatttggcagggtcataggacaatagtggagggaaggtcagcagataaacaagtgaacaaaggtctctggttttcctaggcagaggaccctgcggccttccgcagtgtttgtgtccctgggtacttgagattagggactggtgatgactcttaacgagcatgctgccttcaagcatctgtttaacaaagcacatcttgcaccgcccttaatccatttaaccctgagtggacacagcacatgtttcagagagcacagggttgggggtaaggtcaccgatcaacaggatcccaaggcagaagttttcttagtacagaacaaaatgaaaagtctcccatgtctacttctttctacacagacatggcaaccatccgatttctcaatcttttccccacctttcccgcctttctattccacaaagccgccattgtcatcctggcccgttctcaatgagctgttgggcacacctcccagacggggtggtggccaggcagaggggctcctcacttcccagtaggggcggccgggcagaggcgcccgtcacctcccgggtggggccgctggccgggcggggggctgacctccccacctccctcccggacggggcagctggccgggcggggggctgaccccgccacctccctcccagatagggcggctggcctggcagaggggctcctcacttcccagtaggggcggccgggcagaggcgcccctcacctcccggatggggcggctggccgggtggggggctgacctccccacctccctcccggacggggcagctggccgggcggggggctgaccccgccacctccctcccagatagggcggctggcctggcagaggggctcctcacttcccagtaggggcggccaggcagaggcgcccctcacctcccggacggggcggctggccgggcgggaggctgacgccccgacctccctcccggacggggcggctggccgggcggggggctgaccccccacctccctccctgacggggcggctggccgggcggggggctgaccccccaacctccctcctggacggggcggctggcggggcgtggggctgacccccccacctccctcccggatggggctgctggcctggcggggggctgaccccccccacctccctcccggacggggcggccgccgggcggagacgccccccacctcccagacggggtggccgccgggcggagaggctccccacccctcagacggggcagccgccgggcggagggtctccccactcctcagacggggcggttgccgggcagagggtctcctcacctctcagacggggcggtggggcagagatgctcctcacctcccagacggggtcgtggccgggcagaggcgctcctcacatcccagacggggcggcggggcagaggcgctccccacatctcagacgatgggcggccgggcagagacgctcctcacttcctagatgtgatggcggccggaaagaggcgctcctcacctcctagatgggatggcggccggtcggagacgctcctcacctcccagactgggcagccaggcagaggggctccccacatcccagacgatgggtggccaggcagagacgctccccacttcccagacggggtggcggccgggcagaggctgcaatctcagcactctgggaggccaaggcaggcggctgggaggtggaggttgtagcgagccgagatcacgccactgcactccagcctgggcaccaccgagcactgagtgaacgagactccgcctgcaatcccggcacgtcgggaggccgaggccggcggatcacttgcggttaggggctggagaccggcctggccaacacagcgaaaccccgtctccaccaaaaccagtcaggcgtggcggcgcgagcctgcaatcgcaggcactctgtatttgccttgtaaaacagatcaattctagcccctcttactgtcttactcttacctcttattgccttaaacacaatttaaaatgacaaaaatccaagcacagtgggtcctgggggaaggtagaggaaataaattatactgtgtttagctttatctaaataccttttacagcatgtcaaggaattcattttcagttcattagtgctgtttcataagcatcttcagcaaactcacacaaatgttcacagatgagtatatgcataatctaggacataaagggcattgtttacattattaaaaagagtaacagtttcaaagagtattgccagtttctcccaaattcatgttttttcacttttttaacctcccatttcacattttagatgcttagttcctggttttgttacagacattatctgaaataaggaatagaagattaaaaatgatttgaagtgtatgctgtggttctagagacacatcatttttttttatctctaaaaaggaaaaattctaagtttagaaggagatttcatttgtaaaattgactgtactttataagcagtgtttaaattcattggtggtaaatatgcatgttggtatagtaaaatcccattttttacataatgctttaatggaaatggcagttttatgaaatgaaagtgactagtaaaagtctgaatgatgctcataagcttttacatcatttttattgaaggttttgtgtatgctaatccattaatacaggggaaaaggagaacactaacatggtttattttctataattactcaaatagaatataatttattttcaataaaattcttggagcaaattgcccagagtagggagaggaaggttggcctgttcttacaaatatcttgatttttacccacgggactttgttattttaccagtgatgttgtttcattgcatatattttcagtatagttccctccagatttttacaaataaaagcctgtgaaaggccaagaaatcccaagcatgtaaagacccaggattgtggagggagaaatctgggatgtttattttatcctgtttattattacaaatattgcttgtcttttaatagtttagacttccttttatgtggtttatataagttgaagcaccattaagattgctgtgtaatagcaattaactgtgatgtaatagattaacctggggaaattttcaaaaacagttaagtgtttacatttaaatttggcttatttttgtagagtaccttgaagaagaggtcagtgtaaggaataaacaaatacttaaatttgggatcctcacaccacaacttcataagggggagagggtgaactgaggtatcccgtaggtggttgaggtgtgtgtgcttgtgagttttctgtatttctttgcagttgggttcagcgaggagcagttttctgtgttcaccagtgttgatagcagacaaaatcacacagaaacaaatacgaaaattgttttatgtccagaatgtccctctaatatgcacatgagtaacgttggatcaaatttatgttttcaaaataagtctcatagcagaactagctgtcgtttgattttgggattgagtcccatttccttccttccttatcaccattttgatttcttaatttgtattaaggtaagcccatatcagattgattttttttttttccatgcccggagcacctcaagagtagagacaccagcctgaggatcttaattttgctggagataatccacacacaggtagttttcttcttggtgaatatgtagattgagatctttattctatgccagccacagtgctggggctacagagatggataaggtataatccttgtctcaggagcttagagtctcattgaaaagtttttcaaaacacacatttgaatgattttgttgagtcaacattacgtatttgtttgtgaacacataagcgcacaccctttccccaccttcacttcctgtttccttgcaaatgcaaagacaagagtaaaggacttgcctagaggaaacacagaaatactgatttacaggtgaaaaatatgtaaatttgaaaaggtgttgaaaaagacctaagtttttgtagccacctgactaataaacacagagatcacatgtccaccatagatgggtaaatgaaaaaaagcaagtttcaggttaataggaatagtattatttcattatttgttagcccctatcccttgcacatgtgtgtatgtattgtttgtgtaaacatagatgatgtggaaagatctcccatattgttaatattagttatctcaggggacaaaggaaagcttattcctgtttatacatcttttattgtttggtttaagaagcatgttttacttttttaattaaaaaatctaataaagtaggaagtgaataaataatagtaataaaaagtatcttcaggccactgagcctgttgcagtcttcccagtagcgtgagtaattagtaccgtctgtaatgcttcaggtgtggactgcccagcaggactctgaacttcttgctacagcctaaggtgatactaagttttctgtagcaacactataatgttgagagttactgtgtttatagaccattaacacctcaaagtctttcttccatctgctcctcttggcacactgctctagataatcattttggaatgagtttagtcctttacgctctccctgttagatttcatattgttactgtggaaatcagtatttagcatgggtaagaactggccttagatgcaagccatctggttacagatcctcactaccactatcatgaaaacttggacaagtaacttgtctccccaagcctcagttttctcatctgcaaaacagcaataatcataaagttgtgaggtttcaatgagatgccatatgttagaacacttacactaggtacctggtgaaatagtgggaacatggtaaatattagacgttactgctagtgcattaacctcagctcatctctttcatccattggcatgttaatgagataatcgtggatctcaaatcttcccttaactatatttacagctctcttttccacaaaccttctaaactttcctcatgagacccccaatcagtctctgtctcattctacaggtcccttcaccgatgttgtcaccaccaacctaaagcttggcaacccgacagaccgaaatgtgtgttttaaggtgaagactacagcaccacgtaggtactgtgtgaggcccaacagcggaatcatcgatgcaggggcctcaattaatgtatctggtaagtcctgagactggaggcctagagggtgggctcagaaggcccctggacagtaggttttcttaaagtttgtatttgcagtgtagcagaagaagatgatagaattctctccaccccacccccaccccaccccaccccaccccacaaccctccaccccgtgatcagaaagctgggtcccagtcgcctgtttttttcataattaatgcctccttgtttcaaagcttacagcccctttgcacctcaatagttagagcaaaactgaagtgataactttagactttacttcagaatgagttttgttttcactcccttgaaattaaatctgccctttggcaataaataaaaaagggctaaacaaacttaattttactttgtgggagaaagctaaatggagttattttcttatttaagctaaatgatttctgacattaagctcataccatttccagtgattggccactgcactttactgattgtgaaacgccaagagagatgagggctgagcaaattggaatatactcaagggtgtcagtttggtgcatgtctgatggttttctcttctgtctgggagtgcatgtattttccaaaatccaccttttgaaaaatactggtaaagtgcccaaattgagaattggatttcagaattaaggagatgtcagtgatgggttggagtttaaatgtattttagaaatggaataaacttttagctcattagaacttctccatccaagaaggagctgtgggggagtgtgtatttatcttgtaaatatcaagtgactcagtgtcacagaggcttctgcatcaatagaagctactgctcatttgaaatgagtatctctctggctttttccatgatagattttgattgtgatacacttggctattcatttgacacctaaaagaaaatgattcacctctttggaaagatataaggtgtttcattatctgatcgtttctgcaaactcttattccctgcatctcgtctctctcattatggtgcacccatgccagctctccccctgtgcttctcttgagtctgcaagacctgatcttcgaatcaagttattatcttgaagtcaggagggtcgaagccagcattgattgaggggcttctatgtgctggacctgcacatgtactatctcatgtcatttctcttacctgccctgtaagggatgcattgtcacctccattttactaagaagtagactggtggtcatagcatcgtgaaactagcaaataacagagccaagatgtggatcattctgactggctctgaagcccatgctctttgaactgcagcactctggagaaaggaaggaactgggattttggcatttctgtatcctctggatatgtatggtttaaatttttctgttgacatcaagggcagctgaaatcttttgttcccctcttctatctactttccccccctcgatttccatgcctgtatcaaatttgagcaagtttgtcagtagatgaaaattaccaatttttataggaagaatagggaatgcagcatggttttctgaataaaagaatctcagtaggtggttgtacaatgttagtgtgttttctgatataaaatataaatatgtatgggtgggtgtatgtgtatgtctctatctctctcttttttttttgagacagtctcactttgtcgcccaggctggagtgcagtggcgcgatctctgctcactgcaacctccacctcccagattcaagcaattctcttgcctcagcctcccgagtagctaggattacaggtgcgtgccaccacacctggtaatttttgtatttttagtagagacagggtttcaccatgttggctaggctggtctcaaactcctgacctcaagtgatccgcctgcctcggcctcccaaagtgctgggattacaggcgtgagccaccgcgccaggcatctccgtctctctttcaggaagatccattgtttccccatcataggaatttttaaaaagtaaaagcgaactctgcctttgttctgatttatgattgcttactcaaggaagaccaagactttgtggttgtggccttcctttggcagataaagtaaggcacagagtgtggcacagtcatcaagggtcacttggatggtcatggcagcactgctatttgaagctagtggcttggctcctgatccagtgctctttctgtcatactaaactgcctcagtagtgttagaggatgaccccacttatgaatgaatgtaaaaagtaccatcattctcaaagtttaatgtatttgggggaaaaagtagttgaataataaaatgtccatgtgtctgtagactttcttcctagatgagacaagatcatatctgcaccttagaaagagctcctttgttattatttggtatttagctcagtgcttggggggaaccaaggtgaaaccagatgtcattgcatttctaggacagccttgcaagtcagcaaaggaggccagccccatttgctgcagttgtatgtgctgagggaccactgcatcatttattagacatgcatagcttgggataaaaagcactgcctttttccaggagtcctcttggtattaatacagctacatgatgacatcttggtgagtcactagagtcctcaggaggaggaggataccagtcgacaggcagtgcagattatccaaaagccagcctccccttctccccagatatgcacatggccaagcttggttttacccactctcttcaaagattagtggatttgaggtcgggaaacctgaacaggaagaccagttgtgctgtttaaccagtcagctgaattttgaccaacctattaacctttctaggttcttgttttctcacttgtaaggtagggagaatagtgtctaccttacagaatatatacaaatactgcagaatcaacagcatggtacaagagtggtacatttgtacgttcgttgttcttccactagctttgacaaaaaccggctagtttttgaagaaggtggattgcataatacttgaattgactgtttagaaataaattacccctatattttatttatttatggacctttgctaattttgagaagaaatttgtgttttctcttccttgtgtaatattcatttgttttatagtgaaaagttgccagtacattttcaggtataatctttaaaaaggtggccaccacatcagcttaaaatactgctagcattgccctgcccaccacccaaagtgtcactacatacctgagaaggacatgaccagtgcatttttcccatttctgaaaacccttggaatgcactagctattcgggaaggctgtaaatcattattttaaagagaggagggagggagggggaaggaaagaaagagaggagggaagcaggaaggtgggaagagagggagggttgatggtaatgatgtctgcccatggagctggcacctgtgctggccagagggatcaaggttttgaaggcacacaggttcagattgtgacatggaaagccagatgtctttcagagaaaccctgtgaagctctttttaccttttcacattaccctgatattcaagggaccttacattgtgcttcaaaagttcaggctctgacctatcatgctattttcttcagaacacggcagatcacttattgggtccttaaaaaaactcccttttataaacttaggtggtaaagtaacagttggacacaggcataacctaaactttttgtgtcagtggattataatatgtgggctttcccaaagagttgctttaggccctggccccttggacctgtgatttgaatccttttctttgtcctttacatgggtgctcgtctcatctcatttttattgtagccccttctgaggtttgtgctttttggatgaggtcacatggtagatagggggtgcagggggctttctgtttgcattcactggcccagaatactgtggttttggcccgttgctccatgatacatactatcaactagagatggttttgaattatttaatctggacctcagcaaaataggtacacttaaatagagattgaagaaagggaggttggaattttttcctcctgagatttcaaatgtaaggaataaagaactttttgaattaacgaattgttttgaggcagtggggatcttcccatttgttctagctttacaaaattaaatctattttctgaactgtacggtgggaaaatatttttaaggtacataatttctgaaaatgtctttgtggtaagctgttagtggttgtggatttttttttttttttagtgcttcagttaataatgagggagttttccattaatattccaaaccatgtttgccagcggatacagcaggtgaagtggtaaaattatgggcccatcaaaaatacttatgcttcctgtaatatgatattaagtttaatatttttataaccttcactgaattctaatttcactaaagtagcaagcatgcgtccatttgcagttcagttatgcacattggttgcctgtgtcccaagcaaattagaaatgcaaaatatctgtgtgtggaggggggcattggaaagagtcattaaagataccgatatttagttacagatacactttactaagtgtaccttgggaattgaaaatggattaaagacaaacacaaaactcccagtgtctgaatctgtattttaaattagaattcaaaggattaaggagcagtattcattcctgacatacagcccttttcagcactcttttcaatcacatttaaagcataaagtttttccagtaaaatcctcaggacagccaggtgcagtggcttatgcctgtaatcccagcactttgggaggccgaggcaggcggatcacctgaggttgggaattcgagaccatcctgaccaacatggagaaaccccgtctctactaaacatacaaaattagccgggcatgctggcacatgcctgtaatcccagctactcatgaaggctgaggcaggagaatcacttgagcctgggaggcggaggttgcagtgagccaagatcgcgccattgcactccagcctgggcaacaagagagaaactccatctcacaaaaaaaaaaaaaaaaaaaaaaaaaaaaaaaaaaagaaaagaaaaatcctcagagcatgaacatcagcagctcttcttggatgaaaacattgatcagttaatttaaatggatagtattgtgattaataatccttttaagatttccctgactcagtttaatgtagctgtttggtggccctggagcagtcaaccaggagtgcacctttcaggtgcactagggtataaacgcacagagcccttagacaaagaagccaaacatttatccatcaagcactgatagtgggagctgcatttggggagtttgagcttcttaacagcaacattcttctttgtttgattgtttgctttggaagtctctgataagcgaaacttttttataagtggtttccatgaaccaggcttattactctcagataagaacaactcacattcatactttaaaagatgtctttaatctttttcagcagatgagagattctgcttaaacaaaaagtagaaaaaagaaaattaccaacaaaaattcagcttaattacgcttttaagggtttttacaagtttactgtaatacttaggtttttaaggaagaattgttactttttttgtgactatgacacagtttattctttacatttttaaatatcaagatcaagaggacttacacattttgtctacctcagttagctgaaggtaacttcaactctgtacagcataactgagaagcaaaaaataagcaaagttttaagaagccaaaagtgattttcttttcactcattatgggtccttgcatacttacacacttgagggctctccagtcttgaatcttgtcttgtttattcttaccttagacttactgttaaccctgtcctggttgccagctcatcacagatgagaataaagggaaaggggtacagaggtggccacgttgaaagcggcccatgtgacagtgcatagcagacagtggacgggctgggcaagaacaccaccgagagcaagtgcagggagcattcagaaataacagtggggagctggaattccttaagcctcggggaattgttctccatgttttaggtgatcagccccaagagacacagcttgcaggtttcattaagatggtatataatgggggttcatgtcacaacataagagtaatcagaaaaggggtatgttgtattccattataaatgttagaggagattgaaaagtatgttggatttttgaaaaagatttacattttaaaagatatttataaaaaagagtgaataagccttgttatttggccagtgcctgtatatagcagtcctcatcttccattgatactggagaaaggagacctcactgtcagcacatttgtactagtctcagcacaaacaaattaatcagactgtgaggagtttgttttctaagacagaatacacgaactggaaaatcctgtagagaacacaaagacacttcagtgttaactgatttataaataaatgcaattcattatttatttgctagactcagagttccatccatgggcccctgaataggcagaggtccaccaaggtggtcatgatctcaacgtgttctggaccctaaaggatataataaatttgctcacagtctaactaaaatgtccagcttctttgctttaggctagaattatatcaccttgtttaggtaatgctggttatctccagcttatcaggagctctgcttggcatttatgtatctgtgtctttgattagtctcaaaaaagtggatcagtgacttcattccgaccctgtaagcaccatatggtagaggacagtctttctctatgcaggctttgtgagaggacggggagtgcgagactgagggcactgccatgagaaactggaagccctgtcttgccctcttggaagggagggagtgactctgggaagtgggacagaagaaaagccagctggtgggggtaaagaagggtttcctctttgggcttctccaaggatatttctagggagagcatgattcaggaacgctttgaatgttggaagagaagaaggtgcaaacctgttagctaacgcaaaaaatgcaaattagcacccagaatgtgagctattaaaacattaagttctggtctcagtctcattggggagaaaaagcaaacatgtcagaaggagcttaggagtcttggagttgacagtctcccaataaagtaaggtgcccacagtaggaactgtggtatgaaatggtgtttcagcaggaactgcagtgttaggaggtatagtacagcacagattttccaggtgtgtaccctgggccagcagcagcagcagcccacttggggacctgttagaaattggagtgctcattctcactgcagccctgctaacacaaaaattccggaggtggggtccagcagtctgtgttgtagcaaacattcgtggtgactctgatactcactgaagtttgagaacttttccctccagaattcttatttaaattttattatatttatatatttatttatttttgacaaagtctctctctgtcacccaggctggagtgcagtggtgccattttagctcactgcaacctccacctcctgggttcaaatgattcttgtgcctcagcttccccagtagctgggattacaggtgtgtgccaccatgcccagctaaattttttgtatttttagttagggatgggatttcacaatgttggccaggctggcctcaaactcctggcctcaagtgatctgcctacctcggcctcccaaagtgctgggattacaggtgtgagccactgcacctggccttgtttgtttagttatttatggagttggggtcttgctgtgctgtctagcctggagtgcatgccgctctcatagctcactgtagcctcaaatttctgggctcaagcagtcttcttgcctcagcctcccaagtagctgggactacagacatgcaccaccatgcctggctattccttacagagttctgttagtggattcagtcctggaagatggggtatattgacatgtgagtagggtaagggagaatcaagagaaacgtgtcaggcagggccgacatgataagggagactttgatgatgataggagagcatcactgggtgtaaggacataggggcatgatgtgtggcctgagtgatgcgcacacctgttggagcagaagggaggcctgccaataagagaccaagaaatccaagaagggccagattgtgaaaagctgaactgattgccttttacttaggaaatagttactcttataggaggtttttgatctgaggaattaccatgatacaagtagggtattaaggtacgattaaatttgtggagtttgtaggggctaggcagggtgatttggatgggaaagaaactagaagaaacttggaaaaatctagaaggatctgtgggcctcagctgagattgtgggcacgtaaaatgtggagagagagatttcgaagataagattgtgagattaaaaaaaagtgaagcatgtgctgtagtacttgttagactttatttgctctgttaccgttataatgcagacgaaagtgatctgtgatctgttaccattatgatgcaggcgaaagtgatctgtgatcttttaccattatgatgcaggcgaaagtgacctgtgatctgttaccattatgatgcagacgaaagtgatccgtgatctgttaccgttatgatgcaggcgaaagtgatctgtgatctgttaccattatgatgcaggtccatgatctgttaccattatgatgcagacgaaagtgatctgtgatctgttaccattatgatgcaggcgaaagtgatccgtgatctgttacaattatgatgcaggcgaaagtgatccgtgatctgttaccattatgatgcaggcgaaagtgatctgtgatctgtgatctgttaccattatgatgcaggcgaaagtgatccgtgatctgttaccattatgatgcaggtgaaggtggtccgtgatctgttaccattatgatgcaggtccatgatctgttaccattatgatgcagacgaaagtgattcgtgatctgttaccattatgatgcaggtgaaagtgatccgtgatctgttaccattatgatgcaggcaaaagtgatttgtgatctcgtagcattatgatgcaggcaaaagtgatctgtgatctgttaccattatgatgcaggcaaaagtgatctgtgatctgttaccattatgatgcaggtgaaagtgatctgtgatctgttaccattatgatgcaggcagaagtgatctgtgatctgttaccattatgctgcagatgaaagtgatctgttaccattatgatgcaggcagaagtgatctgtgatctgttaccattatgatgcagatgaaagtgatctgtgatctgttaccattatgatgcaggcgaaagtgatctgtgatctgttaccattatgatgctggtgaaagtgatctgtgatctgttaccattatgatgcaggcgaaagtgatctgtgatctgttaccattatgatgcaggggaaagtgatctgtgatctgttaccattatgatgcaggcgaaagtgatctgtgatctgttaccattatgatgcaggcgaaagtgatctgtgatctgttaccattatgatgcaggcgaaagtgatctgtgatttgcttgggttctcagaagcagcatttaactgcatttaatcaagtcatcattactccaaggggtgtgtgtgtatgttttaagtagcgtatcttctgtgtttcttctctgttcaggcaactctgatcttaatgatccaatgttttatgaccccaaaggccctttcttaacaggatcccagtttgcaatctgtaatacaacaggcattgtatcacaaagcattaatgtagatgagtagtgacctggcttccaggctgtcttctggtaacaggcttctgtttagtgtagtatcagcagatacattttaaaagtaggatagatggttcatttaagagggctttatcatcagtattcacttgaataccagagatactggtgaataccatttggtgtagcgtaacagtgcttaaactttttggtctcaggacccctttaaattcttaaaaatgaagatgcagctgggcacagtggcaggcacctatagtcctagctactcaggaggctaaggcgggaggatcacttgagcccaggagttggaggccagtctggacaacatagcaagaccccatctcttgaaaaaaagtgaaagtgaaataaatttaagttaatggcaaactcttttatagtctgccatggtaaaaagtacataatttctgtcacaatttgcacatatggagctgaaagaactaatgattagcaacattctgtcatgtttttataaagttcccactaacaggatagagcaaattgaatttgacatgagatgatagtagctgagaaatacaaactctttgatgtgagttaggggccatgttatgcaggatgtggatactgagatactccagaagtttatgaagtttcacagaatctgggtgtcccaagtcctcactgtggctggctgatgtaggagcccacaagccaaggagagctggtgatgaaaaacacccccatttgctgttccaggctggtagaaatctagaagtgagtctttggggcctgagctgagattgtaggcgtgtaaatgcgaagagatttcaaagatgagattctgagatttaaaaaatgaagcatatgccatggtgcttgttagacttttttttttttttccaaagcagaaaacttttctcagatcaaaaacctcccataactacccaccttatacccagaacttcctgaaagttgacatgccggtagggcacagtttttattcccaattgaaaagtttccattcaccaatgcatgtaggcatctgtgtatatatctcctcagtcctccgcttttgcagaagggctgttggacctgctacctcaggctgtcgccggtgctctgttaaagtgattgcttacacccactgccttgtgtgcttgcatgcctgtttatgtcttctcctctgcccatgaaatggtccttccatgtctacactgtggtgacttggtaggtaggatgttctaggcctggagctgtgctggtgacatctgtaaggtctgcagtaagggggcagtatatctcagacagtgcccttttgtggaggtagagcaagcagttgcaaaggcctttgattagaggagcatagggaacgcccattccttccgtaagggatgtgtgtgcatgcatatgtgcctctattttcacctgagggccaggtacgtcccgaaaactcaagacctggtttgtgtaaatctcctttctctttttaaactgcagattctcccaagaggggtactacacagagccaccagtgtgttattacttggccgcattgacttatttaactatatttttacctcctggagggcctgtgagaccatttggtgtagcataacagtgctcaaactttttggtctcaggacccctttacattcttaaaaatgaagacgcagctgggcacagtgacaggcacctatagtcctagctactcaggaggcaaggcaggaggatcacttgagcccaggagttgtaggccagcctggacaacatagcaagacctcatctcttaaaaaaaaaaaaagtaagacccaaaaagcttttggtttgtggggtatatcaatatttattatattaaaaattaaactgaaaattcatataattatttaagaataacataattacatgttaacagagtaacatttttaatgaaaagtaacttttcaaaaaaattaggagactgatacttgacattttttcattttttgccaatttttctttttttttttgaggtggagtctctgtcgctcaggctgtaatgcagtggcacaatcttgccactgcactccagcatgagggacagagtgagactccatcctcccaggttcaagtgattctcatgcctcagcctcccgaatagctgggattacaggtgcccaccaccgtgcctggctaatttttgtattttcagtagagacaggttttgcctcttggccaggctggtcacagactcctggcctcaggtgatccacccaccttggcctcccaaagttctgggattacagccatgagctgctgtgcctggcctgcaaatttcatttttctttttttttttgttttgagacagagtctcactcttgtcgcccaggctggagtgcagtggcgccgtcttggctcactgcaatctccacctcgcaggtttaagcgattctcctgcctcagcctcctgagtagctgggattacaggcatgcaccaccacacccagataatttttgtatttttagtaaagaaagggtttcaccatgttggcgaggctggtctggaactcttgacctcaggtgatccacccgcctcggcctcccaaagtgctgggattacaggcgtgagccactgcgccctgctgcacatttctttagtgtctgtttcaatagaagacaggctggatgctcatatctgcttctgcatttagtctgttaggatgtgttcttttggtgaatgcatatgaagaaaaactgctgtcaccacagatatgtagttggaaaaggggagagtatgtttaattgctttttcagataaatctgaacattcttcgatactacaccaaaacttgacaagtgttactttcttcaaggttattagtatgatgtggaatctgaagccatgtctgtgactttttgaacattgtttcactaaaacacatcagtctctgttgtactttgaatggattttgtgatatcatgcatggattgtttggaaaccatttgctgagtgttgcagagcttccaaatgttggcatattgcattgtacactcacaaaaaaatcacattcatttcttttcctgatgatctcattggaaaagtctgtaagtatttgcagaaccatgaagctctggttggcagatgaaagtattccacaattataatttttacctaaaagcctgtattttatcattgacagtaactactgtaaattgtttttctctagagtcaaagccaggtttgagccctggcactcttgtttaatacgctggccatgggacccaggtgagcccacttagcgcctttctgagcccttatcttgtttgtttttttttttgttttttctttttttttaagagactgggtcttgctctgtcacccaggctggagttcagtggtgctatcatagctctctgcagcctccatctcccaggcctaagcagtccttccacctcaatctcagcctctcaagtagctgggactataggctaccatgcccagctaatttttttgtggtagagatggggtcttgctttgtcgcccaggttggtcttgaactcaagtgatcctcccgccttggcctcccaaagtgctggtgttacagttgtgagccaccatgcctggcagcccttatctttttatcttgaaaaaggagacgtgctgcttggatggattgttgtgagtagtaaatgggagcactaaggagaatttgccttctatggtacctattacacaggaggcatgagtaaagattcttttcctttctttccttcttgggccatcatgaaagtattggggatgaagaagctgagggatgatggagaaatggaaaggaaggacctgttttcccttggggcattcttagaacccaggcagagctctggacacagtgctcttggctgtacttttttactcccactgcctctaggaaggtgatgaatgggaaggggcaggcagagcttcctggggctgttttttgggggtgtgttctgttctctggacccattggtttttgtatttcatctaaatagcttctctaaaaattagcattttccttggattgctgtcatgtgagcatcagggatctttacaaataaaccttgttcctcctcagagctctccagagtggtagacttgggagtggtgcaatagctgttcacagctgggagaacagagtctcaagggtaagacggtgtttactactagatctgtgccctgccaaaaatctaagagtagttcaggtcaaagttctcttctttcctaaactgaaaaataccagagcatgattttgtcacagccaaggaagacctgaaattcttaaaactgaattcactttaattttagaaagggaacattaatctaacagtgaatcccagctccaaagaaggttgacagtccctgtccaggaaggttcacagagcatgtaaagacattggctctttactttaaaatgtgtgttttcgttattgcaatcttaggggcaggaaaaaaacacattgggaatttggctttcagaaaaagcattgacctgccagtctggtcatttgtccctgaggttaagtgtcaagcccaggtcggtaaatgttccaggtctgtctgtaggaaaggtcagctcttgccagctcagtgatgccagagaaagagttatgttgataaaaggtttactctctgacagttattgaattttgtcctgaagaagtctcccagcaaggcttccttgtagctcagggccttcaggtgggtcttgtgggcagtgaagctgtctgggtgactagggacaccagtgcatttaagtccaatgcatggttaggtctcagtggactttctctgttcccatggtgaagagtgctactgcatccctaagatggatgggggaggttggtatttctatcctgttttgtgaatggttccattagctttgtcgtggggcctgggtgccagatataaatctagctcatattggagtgactagtgtggtgaaaggggtgctagactgcacttgtagtcaagtcttggctctttgtcccagtgttgccacttcttaacattgtgactttgagggagccacttcactttgtggaatcccagattcttcatttgtagaccacggctatcctgctttctatctgctgctggctgtggttgattgtgtggctctagaggaagcacctgggaagtcctaagttggggtttcaaggcaagagaatgctgatgagggcccagcagaaaggtggtagaagccctgctggtgagaagcataagacttgtactgtcagaggacaaggcaccagtcctttgtggtggctgtgaacttaggtccccacaccaactgcctgggtttgagtctgcactccaccaaggtgtaaccttgggcaaattcacctctctgtgttcattcttttcatgtgaaaagtagacaccagaatagcccctctcccccaacaatagtacctactttttaaggattaaatgagatgatggtaaacctaagggacagagcccagtttctggcacatggagatactcagtccatgcccactgttgtggtcaaggccacagtaggctttccctgcatgtgaagttgtctcagggaacttaactagatgtgtgggttagccaaagccttgtagcaaagtaacatattttaaagcagccatcatttgataggagtaggcccagctgtactctaggaagtaggctgaagggagccacttggggtaggaaggcacctccctccatgcagtgggtgtgactcatccacaggatcctctgtgtgagatttctctaggttcttagggaaaaaaaagggggagtataagctgataccgttttccctgctgtgtgagtgtcctgattgtaaaaattttctagctttatgttggcaaaattgtatttcaaggattaccttgattagctatatgagaaatgggttggagagaagctacaacagttccttaaatgttcttaaacatcttagattattctatttaattcctgaagagatcatttggatatgttttcttgagcaaaacaggcagatggtgttgctacccagtttcccaattctgtaaggcctgtagcagacatttacggtaggcttgcagtagtgaaagatccatggactaggaatcagaagactgggtcctcggccttattcccagctctgtcatgcgtgattttgtggctcttaggttggtgacctgcaaaatggagatgttggtcatccttgcttacttcaccaggggcgtccatcctaagacataagagaatgccggtaaattgctttacaaccaaagtacaagtattagcataataaatggcactgacaaccaagctctgaccctcctaatgaaatattttctttctcagtgatgttacagcctttcgattatgatcccaatgagaaaagtaaacacaagtttatggttcagtctatgtttgctccaactgacacttcagatatggaagcagtagtaagtactgaatgcttcttatttttttcagtaacaataatttaaaaaaccaattagatatggaattgtgggtgcatgcatttcaaaatatgtcaaaattatttaaaagggaatagttttttttcaaggaggtttgtactttatctacctttatggtttttctaaaactttgaggaataattttaacattttttgtgactttctagaaggctgttcttttctgactttcctgagctcagtgtgcttcagcagctccttgcactggtggatggtgtcttgcatggttagggattgccttctttcgcctctcctttctgccccgacagaaaaggatacttttcattgtcccgcctttttcttacttgtcttctcatcccccacaaactcaagagccatgtgagagtgtcagtgctgaatgtcctcacccatttagacatacatgtttgtggctttgttctagtaaatatgcttatttattttcccccctgcttaaatctatgtttaacttttctctaattttgataaaattaagatgacttcatttttataaaagaaataagtgatgttagtgatggttttggaaaaaaaaaaaagagtataatggacattccctccaaaacgagctttttatacatttgaataagtccattggcattctggggctgggagttgaattgaaatctacaatacaacccacagccccagcagggacagatgcgcttgtccttacagttcaggaaagcaggacagggttgcctcataccacttgcattgctctccagttttggcccgcccaaaggggagccccgagtcatccacggcaggtctgcccacctgagtccgctgttcatcacaccatactgcagttctcctctgtctgagtttcataccaagggcaactcaggccaagaccaccccatgccctatgtcaccacatagccttttgtttaagttctggagaagcatctccgctgatgtttcacttgtaggcagaaaatgaaggaggaggccagatatttttgacttttagagagatcagtgataataggctgtcttcttttcataagaacaattcttatgaaaactttctctgattttctgcaacatgatgtgttacttcatgttaatttgtgtgatcaaagaaacatggcagatagaaaataatggaagatccaagggtgtgttctgtttggcttctgctgcatggcatagtgaaaagagcatgggcttgggtgttttcgagctgagttcttccttttactgacgttgtggctgggagcaggttttattaactctgttgaggttttgatcatttgtaaaatagggataaaaatgcagctcacacagtggtgagtatgaagtgtgcctgtgtaagtgcctggtgggtccagtgtctgacacttgcttatcagagtgtgtaataggccagtcactgcatatctagtaaagggtcattttagttccttgtatgatgatataagtttaaattttttttatataaaatgtacattgtgggaaattttggaaatacacaaatgaaaaaaatttaaagtgacccatagttcttttctactaggcctaaccatcattaatgagaaatgagagctttgtgtttttcttcctttttttttttttttttttttttggagacatgattttactgtgtcacctaggctggaatgcagtggagtgatctcagctcgctgcagcctccacctcctgggctcaagtgatcctcccacctcagcctcccaagtagctgggaccacaggagcgcaccaccatgcctggctaatttttttgtagagacaggttttctccatgttgcccaagctggtctcaaactcctggactcaagcgatctgcccacctcagcctcccaaagtggtaggattacaggcatgagccactgccccagcctgctttttctttattttaaaatgtttttctttttattgtgatatacagaaagttgaaaaaatagcatggtgaccactcatataacttttacctagatttacatttgttaacatgttgtgacatttgcttcctttctgtcacaaactttcttatttgcttgagatgcaaatttatgacacttcacccctaaatgcttcagagcaaggacagtctcttatatagtcatgatactattaatcatagctgaaaaaagtaacttcaattcagtattattatgtgataaattcatattcattatttcctagttgttccaaaagtgacctttagtagaggacacccaaacctttttgtttttcaaactttgaactttttttttttttttttttttttttgagacaaagtcttgctttgtcaccaaggctgaagtgcagtggtgcagtcatggcttgacctccacctcagctgttcgagtaactaaaactacaggcatgccaccatgccggctatttttttatttttttatagagttggggtctcactatgttgcccaggctggtcttgaacttctgggctcaagtgatcctcctgcctctgcctctcgaagtgctgggattacaggtgtgagccactgcaccctgcccaaactttgaacttctttttttttttaagagtccaggccagttgacttacagaatgtcctgtattctggatttatttgattatttcctcatgattaaattcaagttaaatgtgttttggcaagaatattccatagttggtatttcataccaggttgttccgctgttggtgatgctgtttgatcacttggttaagatggtgactgccagctctctccactgtcatagcacaaagcacatttgcccctgtggttaataggtaatctgtgatactctgagtcatctgatactttgagaccatgtgaatatcctgctcgccagcagtctttcacctggtgcttttagcattcagtgatgatccttgcttgatattttttttgacttatgtggtaggcacacgtgtacaggtgtgtgtgtgcagaggagcagacttcagtattctttgcgattttttcacttaacattctggacattttctccatctaactgagtgctcttcagcatcatttgagtggcagcatgctgttccgtttagtggatctgccataatttttgtggcagtcccctagggtcagatgtatagattgcttcccacttttggttcttggtacctgtgttacagtagctgcctcttgcatggttttgggaagggttgagggcatggagggtgggggtgccttctttttctatatcataaccttgctgctatcctggtctgtaatcctagaataccctggaattcccatcttctgctgccaaaaggagaagtaatcaggagcgtatcctcttaggacatgggatttagctaggaaggtgctctcactacagcctggagggatggagatgggtcttggggtagacacagcccacacactgccacagtgacagaggagggatttggtaatgaatgtgttccgttggtagttggcagagtggttctgaaactagtcccagatagtatgcgcttatactttctagatatgcctttaaaataagtttcattttctcattttaatttaatttattatttttgagacagagtctctcagtgtcccccagcctggagtacagtggcatgatcatggctcactgcagcctccacctcctgggcccaagtgatcctccctcctcagcctcctgagtagctgggaccacaggcatgtgcctccatgcttagctaattttttaatttttttgtagagatgacgtctccttacgttgtgcagactggtctcaaactgctgggctcaaccagtccctccacctcagcctcccaaagtgctgggattacaggcataagccaccatgcccagctgaaaacaagttttattttcataaggagagccaaggttacctggtcatccagacattgtttagaggattcctttttgttcagtggtgggcctgtcccacagagtagcaacatggggagcattggttgactttgaggagtcaggcagcaagacttcagggtttatgaagtgtaatattttgagaaagtgagtgtatttaatcttgtcatgttacaaatattgaaatctcagcagacttcagttctttatttgatatacatcagggctttctcattaagagtatttttctgaaattgtcagttataggaagaaagttattcttccagcaggtttataatatcttgattattaaatttaaattgttttagtggaaggaggcaaaaccggaagaccttatggattcaaaacttagatgtgtgtttgaattgccagcagagaatgataaaccagtaagtatatttatagttaacaataattgaatgttgtaagctgatacttatttgcataccatttcctgcaaaaccaagatttaagttggcaaattattttcctttatctgatgtctgaagaaaaaaaataagctgaagtcagcaaataagtgggcctttatgaaatcagcctttgaaaaactcacggaaagacaactgattgacagtgtttccccttgaaaagtgcagcccgatggccattgagatgtcataaatcctgaagagcttctgtggcctggcaaaggtataggttgctgttaaacagtgggtgagagtgaaagagggaacaatttgccctttatcatggtggttgatggacgtgtgggaagctttcaagttctcttgttttacaaagtgccctgtcagcctccctaccccttttaccctatctacctcttcaatcaaaggctgcttttagatgaggatttctcagcctcaacactgttgatatttggggcaaatccttggtggtggtggaggttgccctgtgtactgtagggtgttttattaatagcagcatccctggcttctgccctcttgatactggtagtacttcccagttgtgacaactaaaaatgtctccagatattgccacatgtgtcctggagggcaatatcaacccccattgagagtgatcccattccggtgttgcctgtggggagaaggaaggagccccatcctctaggctgtccactgtgagcgctttacctttcatgatcctcacttgtgaccagttgaagaaaggagactgtatctgaaatgctaatttggacttcccttcaacctagtcgaaaacattttaatttttataaaaacaccaaaactgtgaaagcatgcagcatgtgaaactatcctagccattaatagctggagttgggaaacagaagtaccctgaaatgttgtgttaacagtatctatgttggtctgcgcgagtgctgttgatttgtgtcaaaactacctgagattttatttctgctgaatcatttaccactatcattaccctgtttctttaagtggatagtggtcattttttccctcttcccagtgtacatcctgtcacaggaaggtcagtttggaagctgtgaaagcagtattctggcctcagctctgtgataggttgacttggtagcctggggccttgcttcacagggcctactcttctcatctggaaaatgatgggtagagctagattccaggccaatgatcgtcagttactctttccctgacaagctgcgtgcttccatgccctccctccactgactggctctcatcccctgtaaatctcaagaggggatcatagctgaatcttggcaggggaaataaggggagtatgtaacttcccaagattgaaacattgcagacactgagtttgtttcaccttcatcccagcttccaaatgctaagttggtaaagtaattcgccctctgtctaatgctctcccaagcctcctaaccccactaaggcaatcctagggatgttcacatctttgtggtgacagtaatttgtggctaataattcctgagcttgcacaattacagtatgctgatttttccgtggcaggaatttgatagtgcaatatacacagccctttttctctttctttgaagtattagtctcagccgaacttcattatttgcccttatccataatttctagggccctgttgctttagattattaagatatcagataaagtaatccatttttaaaataaatgtgacattttacagtgtggatgaaatgctaccacgtttggtgtttgctgagaactactttactttgcataaaaaagtccattattacatggtcggtgacacttaggctttcatttgtttttgaacagcatgatgtagaaataaataaaattatatccacaactgcatcaaagacagaaacaccaatagtgtctaagtctctgagttcttctttggatgacaccgaagttaagaaggttatggaagaatgtaagaggctgcaaggtgaagttcagaggctacgggaggagaacaagcagttcaaggtaatagtttattttctggtaatctacagaaaacaagggcgttttcactagcttcttgggtggggaagttgatgagccagtgaatatatagatttctttttgcttttggtatttggctatttttttctccccagggagaaatttccatggctttcatgagagtctcaaaagggtccttggatctgcctaaattaagaaccactgtcccttgatcagaaatttctcaactgttgaagctcttgtccccttaaaaaaaaaaacaaaaacaaaaaacttggccgggtgcggtggctcacgcctgtaatcccagcactttgggaggccaaggcgggccgatcacaaggtcaagcgttcaagaccagcctggccaacaaagtgaaaccccgtctctaataaaaaatacaaaaaattagttgggtgtggtggcaggtgcctgtaattccagccactcgggaggctgaggcaggagaatcgcttgaacccaggaggcggaggttgcagtgagctgagatcgtgccactgccctccagcctgggtgacagagctagacttcgtctcaaaaacaaaataaacaaaaccccaaacaactcaaactctccattattgtaaattgaaaataaatgttgagaccaaaatagtttttattttgaatatgcatttttaaaccacttgggtgagaatcttttttcagagagtgaatactgacctatactctgttttaatgcaagtatagttctgattttagaagactctaaataggtctgggcagttgtggctcatcaaactattgatgtggtgatgagcttggaggtggggtgcctcacagtgggtaggaggtggagattatggaaggaaaatctgagcttctagcttctggatgaggcagttggcattggcaatggaaggttgtattgtactgagtgatgaagtggggaggcagggggtgcttcttttggcttgtggtggtgtggaagttgctcccatccaatatgaaacagctctgaatctgtgctggtcacagcatctcttaggcctctgtttgctaaacacctctaaggccccttccagctttaaaagtatgagttttcttctcttttactctgacagtgaggtagatataggagaactgacagcatttgggaaatggcatcatcttcttcctttgcagtgattttgatttgcctcagtcagtaatttctttagtgtgtagtaaattgtgaagctgacactactttttggctaaaaatctaagctatgcctgaagcttctcgagtgtatttctcttctgaaacagagttctgtgctatttaaagtggtaaataggtagaaatagcttctatataacctaataaaataaatggtttagtttgccgggtttttttttaagccagtcggacaccaccagttgtttatcactgtgcagtgatacgggccatgccccatgagcagaatatccttaaaatatgatcagaccaatctcaacattagaagattctttatcctgccaaacactgccttcttgttttgtgttggtttattctgtcatctggccaacaaatttactgagggtctaatatgtgcccggcactgtggattcaaacacgaacagcccctgcccttgaggagctctctgttgttgggatagcagggagagacatagacagaagtgattacaagccagtgtgatcaatgtcccacagagatagcaacaaattgcagggagagtcagctccatgggactcatctgcctgtggtccccaggacctactaggtactcgggcggatgggagcgaatggaaggaaacgaagaaaagaaagtacagctggtgtgtggggtttaaggatgaggagatgaggtaattagcaagagatctatcagcaaagatgagtctgtgccagaatagaatggcttgatgcatgtccctcttcagggatgtgggcttggctttgagagcatggaaatggcatcatagatctacatagtaacttgcagattcttaggaaagtgcaaggcagttgtggcagtggaggtgaaggaagaaaaaatttttcatttcttacatttccatgtagtttggggacaaggggagggtggggaatatggtcaaatatctttatatgtatgaaaaagaatgttgcttcttcaatgagaaatctatgcattaagtagaaaatatttgagatgagtgtatgaaggccagtcacattttaatattccaaatatcatttgatccagcagtctggatgtaactcattaagtaccagctatctacagagctctgcatttgaaagcttccagatgtcccacttttaggtttttttttttttttttttttaatatggagtctcactctgtcaccccaggctaatttttgtaattttagtagagacgaggttttaccatgttgaccaaggggtagtcttgaactcctgagctcaggtgatccacccgcctcagcctcccaaagtacagggattacaagcatgagccaccgtgcccagttgactttgtagattcttttatttatatatttatgtcttgggaaatgcctgtgattttaaaaatcgatgatttgatcaaggaaggctattcattagaggcaggaaggacagagaggttggggttgaagagaagcatccggaagacatggccatagaggtgggtggggccgagggtgcaaagggcccagttgacccttttaagtgcttttttctgtaaatcacgggaaaccaaggagcaccctgtttagatgtctgttgtaactagcagcagcaagtggaatggatgaaagaaaagaggggactgttttctcagtggcttcaggctagccctttcccctctgtagcctgcagtttctccgtttgcaaaatgcggttggaccatatcatgtcatccaacactgggcataaacagcccatcccgttaagctgtacagttgactcccctttctggtgccttggcttgtctttgaaatgtgcgtttgctcccgtaggaagaagatggactgcggatgaggaagacagtgcagagcaacagccccatttcagcattagccccaactgggaaggaagaaggccttagcacccggctcttggctctggtggttttgttctttatcgttggtgtaattattgggaagattgccttgtagaggtagcatgcacaggatggtaaattggattggtggatccaccatatcatgggatttaaatttatcataaccatgtgtaaaaagaaattaatgtatgatgacatctcacaggtcttgcctttaaattacccctccctgcacacacatacacagatacacacacacaaatataatgtaacgatcttttagaaagttaaaaatgtatagtaactgattgagggggaaaagaatgatctttattaatgacaagggaaaccatgagtaatgccacaatggcatattgtaaatgtcattttaaacattggtaggccttggtacatgatgctggattacctctcttaaaatgacacccttcctcgcctgttggtgctggcccttggggagctggagcccagcatgctggggagtgcggtcagctccacacagtagtccccacgtggcccactcccggcccaggctgctttccgtgtcttcagttctgtccaagccatcagctccttgggactgatgaacagagtcagaagcccaaaggaattgcactgtggcagcatcagacgtactcgtcataagtgagaggcgtgtgttgactgattgacccagcgctttggaaataaatggcagtgctttgttcacttaaagggaccaagctaaatttgtattggttcatgtagtgaagtcaaactgttattcagagatgtttaatgcatatttaacttatttaatgtatttcatctcatgttttcttattgtcacaagagtacagttaatgctgcgtgctgctgaactctgttgggtgaactggtattgctgctggagggctgtgggctcctctgtctctggagagtctggtcatgtggaggtggggtttattgggatgctggagaagagctgccaggaagtgttttttctgggtcagtaaataacaactgtcatagggagggaaattctcagtagtgacagtcaactctaggttaccttttttaatgaagagtagtcagtcttctagattgttcttataccacctctcaaccattactcacacttccagcgcccaggtccaagtctgagcctgacctccccttggggacctagcctggagtcaggacaaatggatcgggctgcagagggttagaagcgagggcaccagcagttgtgggtggggagcaagggaagagagaaactcttcagcgaatccttctagtactagttgagagtttgactgtgaattaattttatgccataaaagaccaacccagttctgtttgactatgtagcatcttgaaaagaaaaattataataaagccccaaaattaagaattcttttgtcattttgtcacatttgctctatggggggaattattattttatcatttttattattttgccattggaaggttaactttaaaatgagccctatcactgagaaatacgtgtttcatgatttaactctgtgtgtgtgtgtgtgtgtgtgtgtgtgtgtgtgtgtattttttttttggttgtcttcagctgacagtatgaaaaatgaaactgctgaaaaagctgagcacctggtcacccttggccttccattgctttggccttcagtaaaaagcagcctcccttctaggtcagggaaccatgccattgagactagtaacgggcgttctgggcacagtcccactgtgcacaggtttgagaggacaagttcatcagaaggaaggcagtccttagaagtcacatacgttgagccacgttgctcctaagcctggctctgtcaagctgggtcaggggccttgaaactggagaagtggaagtctatggttggtctgagtaagtaacttcctgtcttcatgaaaaaagttgactttgaatcccaggtactcacagaaatggtgaacagacttagttgttacccaggcacccatggattgtgttgagtgtgcagacagggaggccaccccaataggaattcgtctccaggatttttcccatgtgtcccccagtacttataaaagggagtgaaaagaccgagctgtaaggcatgtgccttctgccacctgactttccgtgaggggactaaaatttactaattgtagttgctgcagccagttaagtcctgtagcttccaggccctcatgtctttgataggagagtgcttaggtggtccccaacagtgcctaggggtacagtacagtcccattacactagagcagggctctatttatttttaaaggatatggccgtgtgttttgataaaactttattcacaaaaacagccgggtcatgggatttggcttgtgagtctgtaacagttcttaaaaagaatatctgagaaactactctgttttagacctttgaaggtgatttagagttttgtgtacatctaggagaaggtgttcagcttctcagaggatgtggacattttggttgcagctaaaaatcagtctctgaagtctctctcccttctagaggttaggacttggtgaacatgtttgtgggccttttgactgagtggcagaaggaaactgctcaggaagagaaacaggtgactgatgggaaggttgattattttctcagtcatcctggcagccaaaaatgtgccaggaaaagaaagaatgtggagcacgcgtggctcctggaggacttggagatgcatgcacatttagggtgttttccctagaattacataatgaaaaaaagaataaggcaaagaggaggtgaatatggggcctgtcacaacggcctgccctgccccaagagggttaagagtcagataatcgggacgaaactggcatggaaagagcgagcctagggaggatgccgctgggcagtgtgcatgggggagctgctgccaggctgccctccagtctgctcctgtggttactggctccacagcacctcagagagggcggccctggcttcagaaatgccagccatagtgctcacaaatgcagaagagatggaagcggtgacagaatcctgaaagtttttattgattgaagttttaaattggtaacttaagcttccttggcacgatacaaaatacctcttaaagacagcaggcttttttatttgtaggtgtgaggaactggctttaacttttttctcctcctagtttgcatgttttccttctctcgtcttctgaactgctggcaccagcagtaatacatactgataaaatcaaaattgatttttaccagtggccagtttatggctagagagacgacttatacctccataacacagaagggggaaaaatgaagaacctccagtgatccgtgaaaacctaaacgctttcaaacaaatcccaggaacagaattgctatcgaaagatatcattgcccagtttgcaggctatgttgagtcagatagaactgaatgtagtgagagctcagagctacagagcctttcagatgaatttgaaaacagactctgtgtgtgtgtgcatgtgtgcatgtgtgcatgtgtggcatatgtgccgtatgtcagtagcttgacagttttcaaatcgtgcctatatttttttgcatacacaaatttttgtgtttgcaaactcagaatccatgccaaaatacaatgttatatgtcattttcagctccttctctaaaggaatggcccatttctcattgtagtttgagaaatacatgtatgaagagataggggtcttgggcttcccagtgtcactttgaacacctgaataacatttaactcctgagaccttctcggtgtagaggccactgcttccccctgctggagatggcatttcattgaagggcctctcgtggctttccctgcccccggctgtctggcctgaagaaggagaaagaaccaaactgaactatgaaaagttaccactctgaggagacctctcttaattaacacttggggccatgtttgctgttgttgagaaggagtgttctcaaagatgagctggaatggaattgtatttagaaaggcccctgcaaagtatatagatggatgactctagttcatgacatacaaatcccataaggccaacgaccactcttctggaacaccaagagcagctctgagatcatgctggccctacgcgaattgagtttctgtggcctaattggatttggagaacgccttccctggccccttttcctcagacagatctgctctgataggaaccttttcaagaaagttactgttgtttcaatgccactccttacctgtatagaacatttccaatacattcgctcattgaacttaatccttgcaactgtgactggggggtagatggctctgtttgcatacgaagaaataaaggctccaggaggttaaatcgggcaactttttagaactaaatcagtctctgtaaggcctacattgctaagataccatttcagctctgaaaatctgcttcagggaagtgagtggatgaggccttcctgcctcagctactctgcccgtctgtacatcttttgtgtctgcctccgtaccttattcagttattttcacactaaagtaagtagaattaagactgtagttcagatgctttttctttttctgttggaaactgaacacactacagacagtgaaaaaaggtacatattccattttctcattgcctgaagatctctgctgatgctcctggagaatgactttgggggctttagaaagaatattgccagtccgtctcggcaaggagatgatgggagcgctttatatggaggctttacatgacttgtaaattaaatgtgaatgagggcagttgattaaaattggtattacagaagggccctgctgaggtttgaaaacagctgagctgctgatgtctcaggcctttccctgaattagcactgcggttctccaggatatcagcaaagagggcaagtaatagaagcccctgataaggagcgtcagccgacaggcaagcttgggaggctgtgggaatgggtctgcccccagcttcacagacctcttcctccagcctctgaatcccattagccacagcctagaacattagctgagctgcacaagctcacccacccctgtgccagggggccctgacctccctccatgccatgtttttggctgtatctacggcacttaacaataggggctttttattttcattacagagatattttgaaaaatttaaaagacatgaactcacataaacagttatggatgatagttaaaagagaaacgggtggaggtggatgagaggttgtcttcatgaatataattacttgagatttttttttcttaatggaattagtttattagaaaatgtctgtgttaaatccgtagaaaaggaagaaaagtgtagcaacaaaaatgtagccattatctaacttgccataaatatttgcagttatgataccttggaatgttgccacgatatggattgctttgattaaaagatgtcagttgaataaaacagtactgtgggagaatcgctttctgctgctagataaatgctgatgtttatttttaaaccaggaaacattgatcctgtaacaatgcccgattacaattgctttattacaccccagggctgatggagatgtaatcacttggctaatggatgtgggtgcaggacagatgctcgcttgctggcctgctttcctgcttgcattctgatgagctgcaggagtgcgcctggccttctgcaggtggagctgctgtcagagcttcgtttcactgatacccaaagccatgtctgactgaaataaaacaggttccctttttttttccctttggaaaatgccaactaagggagactaatcagatatcttaacacaatttcatccaggcttagtgctaacaagattgcggggctttttagggtttaagaagatgagaaatgagtgtgcacgtttcacacgttgacttgccggtttttccatgtcatacaaaaaagtcctggctgtttctccgaactggctgcctgcattcccgtctttcttttgtttttaagaaatagactgaattcagctgttaatcctctagtacagtatccatgttaaaatgtttttccattgcatcttttatgtgaattcaaaggtcagaatttattgtctgtgatattgagaccatgtgtacaagaactactttttgcttttcatcattcactccttagcaaacgtttcgtaagtaccctctgtctgtttgctactatatgaggtgctgcgaaattagtgggcgtggctttttatatttttcattcgtgtgtagcctaagtaaggtgactcaagatgatacaccgagagaaaaatgcaaaatatatttggttctcatttctgttgctgtcgtttcctttttaaagacgatttatcaactgctgccatttggaacttcctataagaaactaaaaatgatctatttcagtgttcctttcgcctttcctctgctttctgaataaatggtttcagtaacccatgctgttctctccctattctacgtctttctccctatgttgaaaaaagattcccacagtttctgatgtgtgtgtttatagtcttcaatgtatgttaacatgttaggaactgagtatcttaagagatgtcttagaatgctttagttttcataatttgtcctttatgtatttttcattgtatttgctgttttgacatggaagtaatttaaaaagttggtgcaggaaaggactctttactgttgcacattttggttttctgatatgtaataaattcatggcttggcagctgacatgatgtttcccagagagaaggagatgtatttctgcagggtccagaccaaaagagccatttacagcatgttctcccatgttccattatcagcctgatgaaacctgccctgccaaggcataaacttttgtactagctgtctccatattatgttcaataaattctgtgctctgaatatatttaaaggatgcttcagtgtaaaattattttgaatggatggcttaattccattgagataggctttggagtgtggactagagcccgttgctcgactctcactgctttgtaggaacatgaaattggtttaaattaaaatcagagaccttttgcaccagaaaacagatctaagagatcacttaggtcaacgtcttcattttactgatgaggaaacttttgcccagagagcttaagcacagggaccagcttgcatgtcagtgttttcctattgggggaagtgtgtgtcatcagtgatttacaaaggtacccacctgtgtaaattgcttccagctttgaaaggtgggtggattctgtcttttaagtagtggttgacagttctccatcttacagtgttaccttgttaaaacgttaatgaaaacaattttaacttcttttggaaaagtaaggtgggcaaatggtaagacttcacacaagaccaaggggtacacagtatacaaaatcaggtttcctccattcccaaacctttctttctccagagatatcctgaactttccatgtgttgactctttctggagatcttctatgcacatatatgtctgtgtatatacagccttgtgttttccttttgttttgagacagggtctcactctgtcatccaggctggagtgcagtggtgtgatcacagctcactgcagcctccacctcccagcctcaagcaatcctcccaccccggcctcctgagtatctgggaccataggcatgcacaagcatgcctggctatcttttttatttttttgtagatatgaggtctctctgtgttgcccaggctggtctcgaactcctgggctcaagccatcctcctgtctcagccttctagagtgctgggattacaggcgtgagccactgcacccaaccatgtgttttctaatacacatgcaacagcacacactaactgctctgttgtgcatgttcctttttggactttgaagtttatcttggagatatttcatgccagcccacatcattctttatggctgcataattttcctctgtatgtgcccttaatttacttaaccagccctctatggaggtacgtttaagcagtttctagtctcactgctaaagacaacgctacaacaaacactcctacaaatgagcaggaatatcacagaatcaatttgtagaggagcagtggttggctcaaagggtgcctgcattttaaattgtgttagatggcttccacattgccatccaaagaggaggtaccaattcatagtcctcgcagggtctgctgctttacgctttgccagcaccttgcgccatctaactttttgatctttcctcacctgtaaaatgcacgtggtgtcttactttgagtttgtggttctttgcatgaggttgagcagttgtttatgtatgtaaaggccatttgaaaacacgatgaaaacccagagtgaagtaaggtcaaagggagcaaaggtttatcacacaaagggctgatggcagagcagcagaaatgaagaggctaagggcacacagtcatgaatgtggaaattggagtctaccttgttttactaacaggaaaaggacttgcagcaaagtgtatcgaagtggattgggcagagggaaataaacaaccgttcatggcaactgctagagctctgattcttgacctgtactggccacctcacttgctctcatctggctgcattcatgtcattcttgcatctctggggtccttttaaccatggccttcccagagggtgcaggggaggcaaatgtcagcatcccagaccaaggagagcttctgtaagagagactgaaaaatggtgatggtcattaaagagttaaaacccgaagcgttaaaaccccaactgtgaaggagttttctaaacagcaacacaaggagctattttgaagaagtgaccacactgatttgccattatctctggttagtgcattagaagacaaaacctgctacctgataatttgccaaggagtaatgggagtgacatgccccattagaaactgaaaatactcttcagaaattgcacttaagagtctagagttttctttttttccaagtagaactttggcctctgttttcttagcaatgtttgactgctaaaatcacttcaaagaagaaaatagtacaaatttgaagaaacacaaaattagtgttacggactttctgaaaaatgttacctttatgccacttcaaaaaatgttaaagaaatgtatagggaagacaagaagctttttaagtcaaaccaagacccgctgtatattttaaccccaccctgcagtcacattgttggtcctaaaagtgcctccacactaaagaaaatactctccattagtaaagagaaaactaccctagaatattcatccagcttatgtgtgaggaagggctggcagtccacggctagggccctggcatggtccccacttttcctcctgtttcccagaagctcagactcccaaatgctctgttctcccatgagtgggcccggctgctctgctcagccctctgtgctccaccactctcgcatcccagagcattcgaaacctctcttaacacggtctgccctttactggattgaaagcaatttgaggggaagttcaaggtttttttgttgttgggtttggttttgtggtgttttcagtttttttttttttttttaataccaaagtattttgtgtgcataatataaaaagccaaacagctataacaggctcatagtgaaaagcagcaggctcatatcgccctgggctacctcttcccagaggttgccagtttagcacattgaactgtttcttctgatattaacatctacatttcctaataatgtggttatattactttttcttgatttttcacttctatatattatctattgatttcctcctaagggagatagggatttagctctaataatctttctcccaaccacatcccaagcatagatttctttctctctccctctcagtcatgttataatttttggctacatcagtatacttttgcatgattaagactactgagatattgtttacacctctaccttaaatgtgctatgcttatatttcccttttatgtgtaatcctttgttttcccggagtcactacgtcttagtgtcttgtttgctcagtttcctatgtatctatcacaaattcagcccagaccctgatagaagtgtgaatctcagcacaatcacaacacctcaggcaatctgatttttctggttttcttaggtcactcctggagctctctgttctcctgctcctctctggactgactgctatctgagcctactgcacagctctcattccagggccttcactcactctcatctttggaactccttttgctctcttctggattggaccccttcttttctggatttctagcttcctctctcttactatcccattttgggggtgcacatcctttagcaagtctctgagcaaggagtatgtgggacataatttttttgagaactttacatgtttgaaaatgtcccattctgctcttccacttgattgatagttgcacagggtataaaacacaaggtttaaatcattctgaggattttggaagcattgttccactgattccagcttctagtgtttcctttaagaaatcaagtgccattctaattcccaattcttttttatttctgggaatattcttcaactttaatttccaaccttcttttgatttttttctgctaacatatttatagttttcaagacatctttcttttccagttattctttgttacagcaacctgctccaagatgtatgtatattttttttcactgaggatattatagctctttgttgctttgttcttttttgttgtcgttctgtatttttgtatgttgttctgcttgagaccagaagtgttttgtaattcagatttttttggattttgggatatttacattatacttcccagttaaacattcctaatttgaaaatccaaaattcaaaatgcttcagtgagcatttcctttgaccattgtgtcaccactcaaaaaaggttgtggattttggagcattttggatcttgaattttcatactggggatacttaacctgtatctaaatttttagcatgatactctgccctgggctgtccctaagtccaaagattttcgggttaaacttttggtttcttaaattggttagggatgggatctaggagtagaattccttttacagacttgtaaaacatttcaaagattcctcctgtttttagccctactgttctgttggcctctgccatgcctagggccaccatttcctaagccttagggggattcatggcacaagtggacttgcttcggagctgtgccctttgaccaacctgctttccaccttctgtaatctcccatcagtgataaattacccatcagctttccagattccagaattttgctgacatctcctgttggctatgttcttatttccttttctgtttattcctgtgaccttgtgccctttaattctttcccataatttgttgggacttcagaaggaagtggagctaaaggcatgtgtctgcctgccccatcttggctggaagttgggaaggccttccttccaaggcacccagcatagcacctggcacatgatggatgctcagcaaatgtctgtgggtcttctttttactaaacaggcagttgatttcaccagaagtagtgaccacctaagttttggtaattttttttctcctgagggattaaaaacaatgccaaatgcaggagtgagagtagtaggttattaataacccctaggaaatacatactgtatcacaggacaaagacccatcctcactaagagtttgttttgttttgttttgagacggagccttgctctgttgcccaggctggagtacagtggcatgatctcgcctcactgcaacctccacctcccgggttcaagtgattctcctgcctcagcctcccgagtagctgggactacaggtgcttgccaccacgcctggctaattttttgcatttttaggaggtggagtttcaccgtgttaaccaggatactcttggtctcctgacctcgtgatctacccacctcagcctcccaaagtgctgggattataggcgtcagccaccaaacccgttttttttttttgttttttttttttttttgccatttctctcaaaatacgttattgattccatttgaatcacttactattttgggtcttcccgtaactgatgttggggctggttggctccaggaaccatcaggtttcagcccattttattgataaagaaactgaagctggcagggtcgggggtgggggagatggaggctccaaaactaagaaaggaaagccttgggtacctgtgtgaggctgaggctctcccagtctccctgacctttgggggatgagaagcttgagatggagtctcaaggcacctcttaccaggccctgtggcctcctatttggggagagcagtggtcttcaatgcctttctagatatatcctggctactagaaaacagatgtcctcaagttcacaggcctgggttctgctctgctcatctgattagaaaaaaagtcagcaacatcgaaattccaggccagtatagtgtgtgggtgtcatcttgctgcttgaattcggagtctccaatcaggtcttggaacatgtattcttttaactggtatttattgacctcctactatgtgcccggcaccattctaacactggggatccacagagaacaagacagacaaggaccctgctggcaaggaactcattctagaggagaggggctaacaataggtgaaaaccaacaaacgggatttttttcagatttcggccactgacaaatgctgtgatgaagtcactgcgctgtggtgggcgctatctttggggtggtcaggggtgaggtgggcagagccttccaggtgagggagaactggagccaagaccttgagagggactgggttccatgggactgcaggagagcaaggaggccactgtggccgaaatggaaggtagaggtgtcaggtgggcaggaggagggtctgtctggaagcttggaagggtggttttagggaatgtcgacaggtcatttgtgctcatgctgacatccatttaagcggggttgtgtgtgtgagaaggagcaggctttcagtctcagaaccatcaggagcggactggaggctgcacgctactgttcaagtcccctcttgaagtgggaacagctcttccctgcttgtctccggtctgcgatgctaatgggtatgaatcagccctgaccaggccctgatgcagtgctacattctgcgtcagaaagctccagtccctcgtgtctgagtcacctgtgcccccaggagaggatgcacagaccagggccacgtgctggtgggcctgcgtcaccaagccacacactgctgttcagcccggtagcaccgctgggagattaaaagcatgcgcttagtgaaaggcaaagagcttcttttgataaccagcatctgttagttaatggacctctgagagctgtatacaatttcaactttttattaaagaaaaaaagctcatttgctctcctgggagttgcacaatgaaattatcaactgcatgggcttcccacccaccccccacctttcaacgtgactgaacatgcaatggagaacattaattttatctggaaataggactctaggctttcctccccgtctgtagatgagagcgctctcacgttttatgtgaagggcagagacttaaggggcgggagcaaagggctggaaggaaggcttggtgcccatgggcctctggccctgtaccagacagtctcagcccctcagcctctgaaatgaccccttcctttatcagcccagagtcttggaagccctgaccttctgcctgggagaaaagggatggttgccctttcttcagccttcgtagctccgagcagcatcacctgcccccaaactaacaagccccagcgagcagagagcaactaagtccaactgaggggatccaggaagctgctgtcctgctcaacacactccttctcattagggatggcatcccacgaagcaacactaaattgccttccccaaataaaatcaaggaatcctattccctccaagagtgaggaggacaccccaagcccgtgggctgtgatacagaggcccggatctcaggctctggagcccagccccttctctctgtgccttagtgtcctcgcgcgcaagacgcagagactcacacacctctcactgactcagctgggcctctcgagggtcgctgaatctggtagatggaggtgatccgttcacgggtctcagtgtgaggcttaacagggataaccaacatttactgagtcacatatttattgaagttctttctaccatgcaccaggcacactggacccttccggaaagatcgcaggaagcgagtcagagccgagtctttttcgttggagcttacattctaggcaaataaggtcatttccgccagtgatcagttttcatgacaaagaacatacaactgtgatgcagtggactgacagaaggaccagggaaatggggctgctctttgggatgcgaatggtgacatcttcaggagacaacatctggtctgagacttgattgaaaagaaagtgctcaacttctgaaggtctgggggaagagaggctaggcggaaatcagggcttgtgcaaaggccccaaggcagcaagagctcctgtgatcaagaaacagagagaaggccagtgtggccggggcatgtggaggcgtggctgagccttgcaggcaacagcgagccagaagtcgggcttttattctgagtgcagtggaagcccctggggggttttcagcaggacaggcagtggcatgaaagcagaactgagagagctggggtttacctccactggttttattctctttcacacattctctggaagacactccacttcctttctttagaactgtaattcccttggttgactttaataaccagcaagaacatttttcaggctgtttaattttattaaaaggttcaaatttgatgataaatggtggcatggttacttcaagcttcggatacaagacctgctcagccgtggacatatcatcgacacccactgccatccccaccaggagctcccccaaccctgatgtagtctgagaccgtaaataatgtaatgatttcttgtactttggtaaatatgccaggaacacttgtagctgtctgagagctacagagaatactaacttggtgggctttttttttttttaagaggaaggatgggtaataagtggaagcaatttcagcaggctgactgaaccccacacagtctcagggaggaaaagggcttccctctgaaaccatcattaacctcacagacaattgttcaaaatctgtgataagagctagagatagggatcaggaggaggaaggagggggtgagtcattggcccccagtcctgaaaacccttgggcccaccaggatgccagttaatttcacagtgtacagatgaggccctgggaacatgggcagagtccctggggaggcacagcctgttcccaccatgatgacagtcccctctgagcagaggacaccaatatattaggattatggcaaggaggctgggcaaggcggagctgcctagatgtcgccatgtagcctggtgaccccgacctctccctagggtgggcccaaagatacacattcggagattctcttcctttgtcaggcaggcacaggcaatcttggcaaccgaggatggctgggcagggcgaattgcagagcgcgttagtgttacggctgtcattactattaactatgttcagaaggctggaaatgctgctcccctccaaagacctgcccccagcagccagcctggtgcacactggcatttgcctgggccaggaaggcttggaggccgcaggctgctctggggaggccatgcttctcagcttagatggagtcctcttcattttgcatgctggcccgggaaaactggatttatccacatgcagtgttggcagcttgaggtccgactcgcagaagcacaggcaaatgcagacgaatgccagcagtcaggactcaggaaagctgagctgcccctgaagacacaagccctttgcccaaaagctgagaagcactgaaagcccgaagtggcatctttaattcatggcaccacttagagatcgtattgctaaattcgaattaataatctttaaacaacaacctacagacatggcagaactgtaggcctcgtccctaggcagagcctcaggatctcctcttgctcccatcttggaatcccaagggtcaggatgggaagaactggggggaacatgggatgggggtgttccgtgtggccccctgactgcacctgttggcgagctgccaaggatgaggaaagtagaaaaattgggagtgatctttagaaactcacgtagcgatgaacatcactgccgcatccaagtgcttgactggggacccgggctgtgggatgtggtataggctttgcaggggttaagctcatgtcctgagccacatgggacacaggcagagtttggaagcagtggggctgtgcatccatccatgacagagcagaggagaatggttccttccctacagctgccaggagggagtctgaagggttgaatgggtgtccagagccgccatcctgatgtcaagtccaatgtcatagccagtggaggaaggccagccctagaactaggggcagaagtgggaagggggctatgtgaagaccccctgtgctggggtgcttctgcagcgatggcctgtgctgcggtggcctggagaagtcgggggcctccccatgacagagcaccaggggtgcttggtaggaggtgggacgtttctctggggtatcgggacttgagccatcggtgggcctttgtccgatgaagagcaggctttgcccgagggggtcttgttccatcttgaaaagctcgtactccacatgcgggagccggatgcccagcggtaggcagccgttggtggctgtgacatcccgctcagtgcccatggaccaggcccccgcacccccacagctgcttggctcagagaagttgagcatggccgtggtgacctggtccatgggggtcacatgggcccgtgtgacctcaaacaccagctcggtgccgccgcggaccctggtggatggcgtgcccctggtgtagcggccggcggcatacacggtgaaggtgggctgccggcaggctgggtctgagaagtggtggtaatacccttcccaggagcggctgtgcccgtggaaagtgaagagccgggtgaggaacaggactgctgggcgcacctcgcaccccgagctgacccaccagccgcccaggtgcaggggcagggccagagggggcggcagcacgggcgggtggtgcacatcggagcgggcaatgaggccacaggctgggcacggctgcacgtggtgctggcaaaagacaaacagaaaaacggtggttgtcccacatagagaagttggggtgcagcctggaaaggaaccccagctctgtaggggtgtcaaggcagggtgaggtgcggcctgtccctccctcctctctctcctcactccctgccttcagtcaggacgacctccttgcttcagccaggatggcctccttgatggaggtcagcccctgtatcccccgggccttgggtctcctgctgtctcttccacctggaattccccgccagctccttcttacctcttaggtctcagctgggcaccagagagagctttcccgaatgccccatgtaaggtgggcctcagggctgtcacaccaccctcttttatcttcctcattccaccccctgagactctcctctctctacccctcacccctcatcaaactggaatgcatcgtgccttacagtactaaaaagccctagaaagccgggactgtctctgcggctaccccatccccaccgcacagggcttggctcacagcaagcacatatttgttgcatgaataaatgagaaatgaatggaagcataggtggccttcgtcttgggacctgagagaacttgtccttgctcatgcccagtctgcttggtcctggaatttgaccgtgaaagttgatctttttctagctcactcttctaggtgtttcagaagtgccaagaactatgctaagcacttcctgggcaactggtacatgttatagctgagggagctgagacccagagggccggctgggctgcccaggttgtccagcctggaagtggcagagaccagctgaaatgcagcctggcttacacccggctgtctgagctccccctctcatgtgctcatagcaggttacatcttccctacaggtggagaatagaggatttttgtctttagaaatctcacagtggaaggtgcgcatcatttgctctacctaccccatggaaagtggatatggcaacaaggatcaaaagccatcaaaatatgtctgagccgggcacagtggctcacacctgtaatcccagctctttgggaggctgaggtgggcagatcacttgaggtcaggaattcaagaccagcctggccaacacggtgaaaactcatctctactagaaatacaaaaattagcctggtgtggtggcacatgcctgtattcccagctactcaggaggctgaggtaggagaattgcttgaacctgggaggtggaagttgcagtgagctgagatcacaccattgtactctggcctgggggacagagcgagacaccatctcaaaaaaaaaaaaaaaattggccaggtgcagtgcctcatgcctgtaatcccagcactttgagaggcccaggtggatagatcatgaggtcaggagatcaagaccatcctggccgacatggtgaaatgccatctctacaaaaaatacaaaaattagccaggtgtggtggtatatgcctgtgatactagctactcaggagactgatgtaggacaattgcttgaatcagggaggcagaggctgcagtgagccgagattgtgccactgcactccagcctgggtgacagagcaagactccatctcacaaaaaaaaaaaaaaaaaaaaaaaattatgtctttggaagcccattgcttaagtctgcgcgaaggagatagttgaaatctcgtaaagagctgggactcaaagatgttcattgtcgtgttatttgttatagggaaaaccggccacactcgggtcttcaggtgccaccacaccctcccttgtcccaggctatgagttggttttcctctgtctttgcccttatttacagttgtctctgccttacaaactctcgtgagctgggtttaccgtaaaacacgttaacaggaaacagatgctaaagcaaattgtgtgggagtagtctgcattttggagtgaaaaagctcagcagacgctaaaaaggaatgagatacagatttcttctttcttctttctccttcttctccttctcctattttatttctaaaaaagaagctgccgcccagattgtaggccagagcgccgttctggaaggtaaatggccttggaacttgtcaaagctgatgtgagaacaagcaaacatctcctgctgtggccattccagaaggaaacttagagttgcagtccaggcaggacagccacaggaagggggcattttgagggtccagctgggaaatttgttccaatatattttttcttgcaaaaatcccaaaagacttccacacagcactgctgagtgagtttcatgccagacgagtggcacttagaagttctggtttagaaagaaaatactggatgattgagaacagtttttttttggggggggggggcgtcacattttataagctgttattttttatttctataatgaaccttaagtttccttgatttatataatatcggagaccatattggctttggttatggggatttgggcccagagagcttgacggttctctgaaatgctagcaaatggctgcaaaaatgtttgtgatgggagcaagcaagcttgatagttagccggagtgttggtgattgggatgccggctgataagagtcgactctaattttggcattttaacctacattctgagctgtcacactaatatatattgagaagacataatgcgttacagcaacataatcccagagctgtccttacccaccacaaaagacaaccaaaagatattctctgcagataggacatttagggctgctagttggtaatctggggtgagcagttttctgcagagcagaaacaaattgagaagcagcaaagttttaaggtgaaagagggatgagaaaaagcatttccttctgtggtgcttttgaagctggtgaaacaaggttcccggctccatgggaaatctttcgggcatctttctgcagaggtctgaagtctcatgcgttaataaacaaagcccccagccagcagaattcacacttgtacagaaaccaaactcttactcgtttaagcctgttacataaagttatttctcaaacagcacaaaacagtttctaattaacccccagaggtgacaccaggctcagataattttggtccagtgttggctgattgattagcattctatatccaggcaatgaatttggggatcaaattggttttaaattaacttctaaaaatgttcatgtttaccatctggtttgggtcgtgggcaaggcgtgggccccagagagcttaaggcaacaactgattcatttcttggggatttctctgcagcaattccttctttgaaattatctgtcttttctttctttctttttttttttttctcccaaggagacgggccattggtgagcagacctttaatgtaatgtctgtacatctggcaccgttcatcactgcatacatttctatgtgttttgcttctccatcacatttcaggctggattggtcacccaggttggccgggcagcagggagggcagggacagccatggccccagagtcctgcctggggatgcatgaaattgccagcccccacagcccccggggatctgtcctctctgcattcagagcagtttcccctcctaatgaggtggtggtggccggtaatcaactcaccgctagcgccttctctgaactaagtaggattaacgccagaccagcctagaacactggttgccaaaaagggaataattttgaggtcataaaaagaactctgaggctgattttctgattatgagaacttcgtgtcgtgctcctcctctgctatccagatcctcagtttggaggagggggtgggggaaggggaggaaggcaggcttctggtctgtctcatccacagtgctcccgcattggggcaataacaagtgggtactaccaggggttagaagttgcctcattggtttagttccttgagtgtccagtacacggtaggcaacaaatacatgctgaatgatgtgaaggtggcctaagagctccaagaggacttcatggggatgctgaacacatccatccatccacacccattcatccaccctccctccatctgctcgtttgtgcactcaagaaatacgcattgggtgccttgtacagaagtttttcacctcgaatgctaacctcaacttcattttcactaacctttcactaataaaagttaacatttcttctcattgtaaatggaggcaacgagccccagtagcgtcagcagaacctctgaccttgtatgacactaacagcattgcaggtactggaaacatggtttgcagtcgtccctgctttgaaatgagggcaaataaagatttcacatttatcgtttctctatatcacaaattagcgttttaaaacttgggtaactgttttaatagaactggttttcatttaaatcccacgtattttctcttatgctttttttaaaaacagattttctgaggggggttccttaggcttcaccagccaccagaggggtctctgacactgggaaggtcctaggtccacacccttgtaggagccaggctctgagctatgtgccaggagccattatacagtaaagttacgtttctttctgcctgtttgctcatctggcaaaaaaaaaaaaaaaaaagtgtgctgggggactgctagatcctccccaaattaggacggtatgcgtgcaatggcttcttctaaaatctaggttaatcagcttcaatgaaattcgtgttggagtcaaggcggaacatgctaaagagagggtggtttcctttagcctgcagcctccccacaccccggacagcttgctggaaatgcagaaccccgggctccacccagacctgaaggatccctttcggccctctcacaagaagcccaggccacgtggcttcgccgtctggtttgggagtgggcgagggtggcgccccagtggctgtgcggctaggtcagtgtgaggctcgcactgagatttcgagggggtggcatctgggctggtgtgcgcggccccagcggcgccctggaggaaagctgccctctccctaattcatccatccacgtttattggtcctgatcgtcggcctgacccgtgctaggtgcccgctgtggccccacccttgtgaaggacctagcgccagagggagaggcaataaacaagtcaccaacagagcttcagagcgggctgagagctggcaagggtcacctgcgggaaacggggaacggtagaatggggactggagcggatatttcagccgagaactaagggagggggacacccaccaagcctctgtgcccagcaggggcagaaatgagatcctgcagtgcccacgaggacaggggccggggaggactagcgtgggaaggccgaccagaggcccgccagccttgtaaaggctgaaaaaagatgtctccagctgcgtgaacagggtgcgcaaatgtcctgaggcacgcggaccagagtggggaggggcagtgatgacagccgggcagccagagccctgggcaggcccaggtcttgcaaagctgcggggctgggttccgagctcgcctccccgagaccaccacccccctctcccacaccccaacacacacactcaccagtgcgctctgcagcgggcgctggtagcccgtgggccggtagtgccgcctctccgccgggtcggtgtggatgtcccccaggtacagctcctccaccagccggggcgacgcccggggctgcggctgcaggcggcgctgcacgcggaccaggctgagctcgtgcatggtgaggcccagcgcctccaggcagtccccctgagcccgggcgctccgcagctcgtacagcgccccaggcagccaggcccgggccggaggcagccgccgcgcgcagtcccggccggcgcgggtctggttgaggcgcccggtgacgtcgaccagggcccggcggctgtggaagacgatgcccaccttgtgcaggtggtagtcggcctcggtggctccccgggtgacccaggaggcccggcgcaggcggactttgcccttgacgagcagcgagtgggcaggttccccgcagaaggggtcctcgtagtagaactggtgggctcgaaagagccggctggggtagaaggtgtaggcgcgggtcaggaactccggtcctgggcgcacctcgcagctgcaggggtggaaggagatgggctgggtgcagagggaacaccgcgccgcgagcccctctcccctctgggctgggctcctttctcccccccagccctcctcttagtcctcagctcaggcctgggcccctccagcctcagttcccctcactgctcgcagtcaggcacccttggggctggggctttgcactggatgcctcgtggcctcgacacaagccttctagttcattctcctttccttcaatctgaattgccctgctggagggccttttgcaaccacctggggacccgctggcctgggagctccgggatgccctgcctgcttcctcccccgctggactctgggcacctggcccagagcccgccccactccctcccgcgtccttgctgagtgaatggaggcccgtcttgtctcccccttctctaggctcactgccctgaccaggtctcatccttgcctgtgacagggcttgaagatataaaccaggagtcggcaaactttttctgtaaagggctgagtaataaatatttttgttttggtgggctgggtggtttctgctgcaactactcaaagttgccattgtagagctaatgcagctatagatgatacgtgcatggatgggcatggttgtgtgccaataaaactttgtttacaaaaatgggaagtgggctggacttggccccagactccatttgctggtgatacaaacagatccaggggaaggggttggacggagaagaaagagaaatgactcctagactcacggtcaacctggggatggggcagaggaggcctctgggacttcctactgagggcgcaggtagggtggacggtggatgaagtcgggggaaaaatagcaggcaccctcctcacgattttactctaaccaggtaccctcttgtactgctattttctttcttatttttttgagacagaatctcactttgtcacccaggctggaatgcactggtgcaatctcggctcaccgcaacttctgcctcctgggttcaagcaattctcctgcctcagtctcccgagtagctgcaattacaggcatgtgccaccatgcccggccaatttttgtatttttagtagagatggagtttcgtcatgttggccaggctgattttgaactcctgacctcaatcaatctgcccatctcggcctcccaaagtgctgggattacaggcgtgatcccagcccattttcttgatatttttttgtaccagggctgttggagcagaggaaacatgttatcacccagcaaggaaataattcccttttcttttcttccatctttttgataatgttgaggggaaattctctggtcagagctaatgtgtctttaatgccaacctccctgttctcccagagagagcaacttagaacttcgggttggcaacagatctacagaggatttatgttgttttgttttcatggaatttaattttacagttacctttaatttatgacaagtggctctgctccccatatccaggataatattacgttttctttaaaaataatcacattacactgtcaatgtatgccaattatatctcaataaagctgtaaaaataaatgaatatattttagtaaataaaagcaagttggtttacagaaaatgataagtaaatactagtataggtacttaaaaatagggaggggtgagccacacccctgagggtctcaggcctggagaggggagatttgccaggaggacacagcaggtcacactggacctcttgatggttcccaggctctggggcctttcccactcttctcccaagaagcagcaaggtcagtctggagagcatggcagggaactttcaaggaagaaagttctagaagaaatttcttaaaagaactgctccagaatgttactgtcttggggcagaagcagcctacaaccagcgtccccccttcctgtaccccagttctgtctgggtgaccctggtgagtggatgcctggatctcccctggactgtgccgtgggcgtgggggctgtgtgcagcctggctgagcctgcaaatgcattcgaagtggcctcgaaggactcatgtccccttcctccaacgaaagcgctagcagatgtttggcagtcgggagtttctgcctgacctcaggaggtacaggaaggacacggagaggccagtccttgaccccagaatgggactggcctggaggggatgtcgggggaaggaggaatatgccaggtgtgaagggggccacagcctcccttttccccgatccctgccccaggagtgggactcagctggctgctgtagggtttgtgcaccacagatgaggagagaatgcaaagtccattggccgcaaagcagcgactgagcctctgaaatgtcgagtgagcctgtcaggttagacagaattagatgggtgcacccaggctctccctggcctgccacttcccgccccagggcccttcagcagctgccccctctgcctggctcttccctggctctctagatggctgattcctctccttttagctctcagctgatgtcaccacctccaagaagcctcccctgatcactctctaaagaaccctccaggtcacttgctatcacatctttggttttatttccttcattgaagaacttagtgcaatctcaagtttatattattcatttgtgtgttcgcatgttgagcgcatgtcccactgctgacccctggcacttagctcgtaataggtttgtataataggtgttcaaggtgttgaatggattttgaccatggacgtgatgcccaacagagtccctgcctcccattgcactctgggaggggaggcaagcatctccagcagcttggcaggtagaaggcctcttggataactatgtgaattatgcccatttcaaagattggatgccgagtcccagaggcagaagtctcccagtccaggggtccatggtcaggatgacctgaagtcttaccctgtggagatccaaggtccattaaggcgtggaggcaggatcgcagtgctgggcactctatctggcaagggctgctggcagtggggttcccagcgcaggcagctgcccccggcctccccagccgccggtgcagtgtgggctgcaaagcagacagacctgggtaagaccccagcatgccccgggaacacccaccccatctgccctcccaaccccactgtggccacagagagccaggcagggctgtcccgcaacctccatcgcagccccgtccccagggtgccccagttctggagacagtgatgggttccccatattgaggatcctagaatcagcctccccgacgcatctcctcctgggttcccagatgtgatcaccctagaatccaagcctcctagatggagcctgtcccagattctggggctgggaggcctctgagaattgtacacgtggagcagactcttagaagcccagaccttccacgggctcatcagccgtggctgagtcctgcctgctggtggctgaaggacccacgctcctggacaaagggcactctggactcaggacccaaggtgctggggacagtggggccctagcctatccctagagcagaccactcccctccaccaaggagccctgggggctgcttggcctctcccggcacacagcaggcccctcgaggccactcgcttcaggtctcacctggtgctgggcacctgctatctactcggtgctcagcgagcgtgtggcaagggaaagagcgcatggccgctgcagaggcccgggccgaggtgtgaggccaaacaatgcaggccctgcccttcttcagggctccgtccctaagcccagacaccagggggaggaattgggctcagggcagaaggtgactggaagatggacacgggaagcaggcgctgcagcacaagctccaggtcctctagagtgacccctagatgagcttggctgggcctggagaagtgaagcccgggagtgggactgttcacgatcttttctcgggctgctgagaggcgagagtgccaaaaccttcagctgctaaagagcagcagctctcccagaaactgtcatctccaatcagggctgatgggcttgagatggcccagatgacgggatgctgtgggaagctcggcagtgagctgcgtccaaatactccagccacgggctgtgctcaggggcgctggcctggccctggaggcccagctcctgcagcgaagcttccaagcatggctcttcccacccagcctggggctggagtgggtcaggaggggctgagtcttagggctccagtccaggggatgtgggggcctggcagtaacttcaggaggccttgggaggggttgggggctgagttgagaagtgagcagatggcgtgttctgtccctttcctgaccttgcaggcagaccttcccagcaagggttcaggagagctgagggccccccactgcccccgcggagctgcctgaccccaaactctctgtgccccaggggtatttgaggaaaatgaggcagagtggattcctcagttcccttgaggttgggggttgcctctggagacttttggggtccccagtgatcagctgagaaggcaggagtgacgctgattatgacaagggggatgacggcacctgttaactgggtgtggaccccttgctcttttatacattattcccatctgatctttgcaataaccctggagtcggtgttagcatcatcttcctctcatgggcagagaaacaggctcagctcagagatgggctcagcttccacggggcacatgccacccggatgtggcaaagccaggatgtgagcccaggttgttggacttcggggtgtgacggcgtcaccggtgcttgtctcacatccccagagaacacaaaaggggctgacttggagacggggtaaaacgcagggcagtcaacaaacattggccgactgaataaacgaaggtatgagtacaaatgctggtgtagccctaggtccctgttgtaatcttggttcatcctgcaactgatttattggctttaattagccaaataggagaaatgaaaacaaatagccacccagccagggccaaggtgtccccacaccgactcatcagcacttggggccactctgccaagtgaaagaaatgccagtgggatcttgaaagagagaggccgtggttgttttgtctcaacttggcacgtctactttgcaggaatttgtggcaggatattgtagtgggtacgtaggcaccaaagttgggccagatccccatgcaactcgccaggagtcctgagctgacgggtgcacgtcagcgtcaacaccacgtgcatgtggggcttctgcaatctgcttcttcagaagacactgggtttcctggattcaattctgcaggttaatttgaacatcttcagtgtcaacgaaacctgtccaaaagtgttgatttgggggaatggatgaaaacagagcgaggaaaaggatcaaaaggggtcagcaatatttgcctggtaggaaaatcaagcttgcgtttcagagtaaaatagtgaaggggccctgcaaattatcttgtcattgtttccacaaaacttgggctcttgaggaaatgtttttctgttcaaaagaaaacaaggctttttttttccccctgcaccctccctgaagtcactgagactagatggcccttttgtcatgaatcctcagatcctgtgtttctgccgagtgcattttagtttatcttgtttttctgtgaggaactgggatttaattatgttgggagactctgagatacagcgaagtgttgctgcattcggaacatgtacacacaaatgcgaagagctcctcaagatgcacctgtggaggagcatcacgtggcctcttggtcatgcgtgaagtctcaacttcaaggttgcaaaaacgaaattaaccaattataaatgattccatgacattttctccaacatagctcttggggtagatgttggattttctttgcttccccccccaccccttctcttcctccaaaaaagtcttaactaaagaaataacagctgaaagcagatggtgcggtgggttgggttacacaactttttgcagggaagtgatagacggagttaaatgcatggaccaaattgacttttatcaaccatggatttttaattaacagtggtgtccacttactgtcattcattatttactgtttacccactaattaaaaattatgctgtttttgcattcataagagcagggacatttgaaattagatagcattgttcaaattacctgcagaattaaatctagagttcccaattgctcagaccaggctaccggagcttaaaatatgacctgcttgaggccgatgtgttatcctgaatcagagcaccagaaacaggcctcatgaacaaataccatatggacctgcctggggccttccggggaaaggacactcactgagcacacccagaagtgtgggcacttggctaagattgtcttgagatcatcaaatggtgcccagcgtctcctgagcacacattctgggaggcccaaggccaggtgcttcatctgcatcatgaccttgagtcctcacagcggcagcgtgtcagtaccttggcagagcccaaaggattgacaggtataatcgacacaaccacccgtgacatgggttctgtcaatgcacccattttgctgatgaggaaactgtggttcagaggggtggagggacttggccattgccactcctccacagacagatgcttcttagctaaataaaacacaacaacacacctagtaaaatacacctaacataaaaggtaccatcttggctgggcacggtggctcacacctgtaatcccagcactttgggaggccgaggtgggcggatcacctgaggtcaggagcttgtgaccagcctggccaacatggtgaaaccctgtttatactaaaagtacaaaaactagctgggcatggtggcgcgcacctgtaatcccagctattcgggaggctgaggcagaagaatcgcttgaacccaggaggcagaggttgcagtgggccaagatcatgtcattgcactccagactgggtgacaagagtgagactcagtctcaaacaaaacaaaacaaaacaaaacaaaaaataacaggcaccgttttaaccattttaaagtgaacaatttggtggcattaggacattcacaataccgtgcaaacaccaacacgatctcattccagaatgttgtcatcacctcaaaaggggaccctgtgcccatcagcagtcactcccgctcccctctcctcttagatctcggcaacaatgactccgctttctgtctctgtggatttgcctattctggatatttcataaagatggaatcccacactctgtgcccttctcttacctcccttccccagcaattctcctagatgggtgtggttattccagtttgcagatgaacagtggaggcctagagaggcttcactcctggggccacaatttatgttttcttcaaagatcatgaaaaacgcaggtatggatcaaagagagaagagggtggagaaaagatgtgagttttgtagtcagagcagagggagaaatatcagcttttcaggtacctttcttctgggggtaaaaagcaaaagaaaagtacttttttctcctgtaatctgcttgttctgaggttctcgaagcaaggcacgaacgaacacagggtggggtgcgaggtgatttcaggcgcgaagcgagcacttcgtattccaacagtcacgcgtcggttttagagggtgttaaaagtggcggtagttatcataacagccttgtacttgcatggcccgtttttctgaggactgagttttaaaaggtgattgatctgaacttgatattaaaatatttggtattttaattattttcttttaatattttaataaaatcatattttataaggagatgtacaagggactcgtgggtgtggtaaatggcctgagggtggtgcacggaagacggagggaggagcagctcaaggtgaactcgtcacctcacctgaggcacgcgaaaggagagcatctgggcatctcagggctgccacgacaaagaccacacgctgagtggctgaagcaacaggagtcgatcctttcccagtctggagtctgcaagtctgaagtttgaaatcaaggtgtgggtagggcctctcccagcacctggtggctccaggtgtcccttggcttggggctgcatcacgctggtctctacccccatcttcccatggccttcatccctacttgtgtgtttcctctgtctgcacctgtgtccaaatctccctctcctttcttttataaaggcaccaatccctggattagagcccaccctaatcctaatccagtgtgacttcatcctaacttgattacatctgcaaagaccctatatccaaataaggtcctattcccaggtactgggggttaggactcgaacatatcttttttggggggttacattcaacccacagcagataacaagggccatccaaaattgaggtcccccaggtgacccaactatcattcattcattcatttcttctccccaacacaaacacttatttttatttatttatttattttgagacggagtcttgctctgtcgcccaggctggagtgcagtggtgcaatctcggctcactacaacctctgcctcccaggttcaagcaattctcctgcctcagcctcctgagtagctgggactacaggcgcatgccaccatgccctgctaatttttgtatttttagtagagacagggtttcaccatgttagccaggatgatcttgatctcctgacctcgtgatccacccaccttggcttcccaaagttctgggattacaggcgtgagccactgcgccctgccccaaatacttattgaatgcctgttgtatgcctggaaatgaaatggactctgggtctatatggctgcacatgatggtcagaattcctgttctcctggagagactgacattaatcaaatagactcacatcagagtagaacttcaaaccatcccaagtgtcttgatggaaatttaaacaatggccaacaacttcaatgatttcccagtgcacttggttcaatatccaagctttcttgtgtagcctcgaagccctttgaaactgggtgcctttttaccaccagatcatccaccccatcccaccgtgcttttccactgtgagtccctagtgctgaaagggcaaacctttggctgccttgaggctattgcctgtgctgttccatcctctgctctgtgctgggctctccatcttcgcggagatctcggcataaatggcatttcctggcagtgcatcctttccaggcacccctcttctgttcactccattctcttctctcctgtgcagcactcatcacatctggcatttattatctgctttcttacttcggtttacttttttgacttttcattctgaaataatttcagacttacaaaaatgttgcaaaagtggtagaaagagttctagtgtatgctttgtccagtttctctacaggttaacatcttacgcagacattgtgcaatgatcagaaccaggacgttaacatcaatacagtgttcttaacgagtctacagacctaattcaagtttcatccattgtcccattaatgtcccctttctggtccagcatccagtccaggatcctgcattgtattgagctgtcatgtctccttcaatctgagacatatcttctctttttgtcttctacgactttgacacttttgaagagtagtggctcttattttgtagtgtccttagtttgggatggtctgatgtttcctcgtgagtaaattctgctcatgcgtttctggtaagaatgttgtggaagcgatggtgtatctttcccagtgcatcatctcaggaggcacaccatggcaatcatgccattcctggtgatcttgactgtgatcacttgcttaaggaggcatctaccatgtttctccactattaaattactacttttctctctgtgattaatgattaccttatggggatatactcagagataacagaaatatcttgtacttcattatacattccctcactaattttagcatctattgataactgtcaatgattcttgcctacaattattattggtggtgttttccaaatggtcattctctagttccatcactctttctgagtttatttttgtttttagagatggggtctcactatgttgcccaggctggtcttgaactcctgagctcaagagatctgcctgtctcagcctcccaaagtgctgggatttcaggcatgagccactatgcccagctctttctgagttgattaacagtaattgtgctgtaaagatgtactgtcccttctctcccatttatctttttattcaattatttatattactatgaactcctgaatatttattttactttatcggttataacacattactatcattatttattttgttgctcaaattgtccctgatttggccattgggagctcctccagttaatctcctgtgtccttcctgtatgtctttgtcattttagggggagtacttcctcatttcctggtgccagaagatcttccaggatcattttgtatttttttcagtcccatccctgaaactggccatttctccaaggagctctgattccttttattggaaaatggtgtttagaaaccaagatctgggtgctaggtgtgctcactgctagtgggctgtcactttaggcttcttaactttttcttttctccttccttccttccttccttccctctgtcctttcttcctccctccttccttcccttttccccttcccttcccttccctcatttctcccttcctctgcctgtgactccacgagtctgccagcctcatgagggctgggtcctcatctctcttgctcactgctgattctctagcacctggcacagtgcctcagggatgcccaatacatatttgttgtgttaagtcatggaaagtgcttaggacaatgccttcatagactaagtgctcagtaaatgctatttataatgactacttttcgctgaatgaatgaatggcttgtggtccatagcagcacgtgtgtgacttccttgttgacccttctcccacccctcaggatgtggccattacagtcaggcttgaagcaggagaggagaaagacaaggtttacagctgttgggattgccaagaatctggctgagggcaaaagggtgatcagtcagggagttcccagcaggctgggggcccaggctgatccaagcaggtagagaggaaagagaagtaggtgaagggagattggtgtgtgagcatcagatcatgtcacaggcttagatgggttggatctggcctaagaagcgaatgccaggtgctttgctttaaagcctcttttcacccttggaacctgccctagtgaaaccaggatcctgacatggtcctgcacccccaaggaagcctccactagctccacagtcacataatgcaagccataaatgtcagccctgcatgtgattttactggtgcatgttttctagtagccatgttaaaaaagctaaaaagagacaggtaaaatcaattttaatgatatattttatccggctccaagtactatatatttcaacatgtaacaaatacaacgattaatgagatattttatgtgcttttcccccccataccaagtcttcagaacttggtgtatattttatacttacagcacaactcaatttagacaggtcacatttcaggtgccctgtgactacatggccagattagacagcagagctctagctcaaggatggagcatgcatgtcacattttgctgtatcagaggttttcaagttggcttctgaagaccctggggttatttttgaaacagatagggcaacccagtgggtaggatgtagtctttgacccagctttagcccaaacagtccctatctgttgctctgttttatatactgaggtttggattaagatttgctttttttttttttttttttcttaaaatatctgaaaccctctagtttatttcaaaaccgtcagcttgaggtaattcacctagaaagtttggacttggaggaagcttacacatattttaaataaaaatttcagcaatggctccctacccaaaaaataacctctcttgattagaggaggctgccttttacaaatggaggagatatgctggctgcgatggtggccctggctgcgtggccattaagcttcagagaccggctgtggaaatggagccattccagcactgctgcagccaaagatgtactttccaatgaagtcactgcacaaaaggcatgcagggtttgcaccagaacacccccagaaggctgcagattggatgctatgactggatgctgcatcaacaaacacagaaatatgaagacacactttgcattctaagaagcccacctccaacctctggtgtgaatggctggtcctcagatacctcacatgtctctcatttggctataatggaatctcctcatccacctaatccgagaatcttcgtgttcagggctggcaggcaagttggggaatgggttggactttgctaccttgggaaacacagaaattatatgctctaaacaaagcaccctccacccgccgcagccttcagcatcccagccctgtggaatgtgccctcctctgctcagtgcactcagagagttgaaggctgcccgagaaagtcagtcaaggggtacctggcagagcaggtctgaggatgtgagaagcagaagggcctttggattaagaagctgcgggttgacaggtgatcaaagggacagggtttggttagctactggccccccagttctccatgaaaagtctcaggtcagtctggaccacgggatggaggacaaaggtgggccttgcttggtaccacctggagaaggtgactgcttcatgtttgtgtgacatgtgcttaagccacaatggaaaacgctgcgtatgaggaagcggctggccactgaggataactccccgaggcctctgcttagccactcctgctgagggaaaggaagtgcacagttcacagaatgggaaaggaatgggggcctggggagacgagttctggcccaccaagcctggctcataagctaggtttttctgtttgtttgtttaggaatgttccagaacgaaaactgtgcacatgaaaactctcccttggcctcatgataatgctaattattcttgctctggctggagctcccacccagttggaaactggaacatcccagccacaggccagctgcttccaaagagccaaggaagcagggtgacagatggaagcgtttcccttttcacccagatgttccggtgttttggagacaaggcctcgttaacttgactttagcacctgcgttcccagcttgcacgttggtctgtagacattatttataccaaacttggccaatgctgtccactgatgccaacatcccacctggtgcttggaggagccggtgaggggatgatgacagcttgtagcatcactgcgtagaaggggttctgaatgtgcccagatctcactgaatgtcctgttgcctgccctaagcggtgtagttaggagtcagtgttttccaaacagaatgtgtatctgggagtctcccgttggactgaacttttattagctctcttggcagaaggctgaagcttttattgttctatagaacaggacttcggcaagataatcacaaggttttgacacattcaataagaacgaaggtgttcgtatacatcatggcgaagacccctcagaacccagaaagggtgcctgagagggactcctgggatgcccccttgagcggctgaactcttcatggccttggcaactggttctccaccagatcttccccagaggggccaagaatcttgtcgggccgcagaaatatttaggttttgaggagagagggatggaggatggtggtttccattgagtacccttggatctgagacctgcccaaagatgtcgggggtgactgggaggaaccccagcgtcgggggaggcacaccactcaccgagctgttcttgggagcttccacaagggggccctcttgagctttggttggggcgattgggagccagtggcgaaccctcaccccgccggctccagcttcggcctccagctgagggtcacccagcctccctcgttccacccagtccttgcggaagaaggagcccaccaaggccagctctggtgcccaaactttcttccacgtgggagatcttcctttccactcgcgcagagaacgtatttagagactgaaggcaaagggtgaagggtcaccaagcctcgcctctttcagagaagtttgcaacaacacaacaaaagctccagttggaaccacataaaagggcatgtgggaagcttcataaacaatgaaacaagacatctcggctccatgggcctctccccaaagacacatatacgggggcctttgggtcagctgcgacgggaagcactgagattttaaatgcaagaaaattattacaatttaacaaatcaatttttcttacattgtattgagattaagttcgtggtctctttcatacattcaaaataagatatttccctagagtgcaattttgtgggaaaacctacatcatgtttcggaaaacccattttgctaggagttaccagattttaagatagatggtaatatttaattattgcactattttaccgtgtagaaaattaatgtgctttcggagtttcaggagaaagaccggctataagtctgaaccctatttttaaattaccatataaatagaatcccaaagacgcaaatattggcttaagtgttgcagacaaggtacaggaaaatgtgttggcttcctaaatgttaaataaacaggcttgtaattctcaccttccctcatgaccctggcccagctgggttcttaccctcggaagagcgcacgtagctcaggaaggggacaaagcggtgctaattggatgaccacagcgggtgagtcatcagagtatcatggttaccaccacgataacaagatgcacgtttttggtaaagctctggagtcttcgaagcccacattcatggatctgctcgacccttatcacaaaccttccagataggggtgatgactgcctccatcttacagaccccaaaacggaggctcagaagggaaagcctgacagtatcttgcttctgtcacacaacccacaggtggagaggcccaaattcaaaaccgggtccggtaactgtaaacccctagcctccttccatctgcacttacagcccctgatcttggctcgacatttattgagcacctactgtgtgcttggccatggggttgcagagcagagaggcatctacaagggctcagggtctgacattccaagccaattattctgcccagtactggtccagtttaccaaagggaactgaaagagaagaggggcctccagaggggccccactgcctatgtgtgccttgaggtcttgcaggacaagaagctgcttgacagatggagagagctgtaatgggcactccaggcaggagctgtaaaggtagcagggaggtgtgaactagcagagagagatggaggaggatgtaattagtccatgtgtgatggtggcgccgtggggagggttgtcatggggagagctagagaagcacagagcggctggtgcggagggaggccttgctgctgcttcttggggctggaatgttctccaggaggtgggcagggagcttgcagggggtgagatcaggtgtatgctttgaaaagcagtgttttctacgctggctgtgcctcctgggtggcactgcccaccattccaggggtccatggtggacattttacactggattaatttcatgtctattttgactcaattcaataactgacacgtcaatcctgggttgctgttaggatgaggctaaggcacagagggatagattattttaaaaaataagttaagtgagaatgagctagttgatgtggagagaaatgttgactcagttacagaacagtaataatcagatgtggccaaatggccggaatggcacctggtgacaggtggttggaggcccaggctctacggcccccgctggcttgtgttaaggatgatgtcgtgcacatttgagggctggggaaggagggacttgagagggcctgtgggtaccaattcaattcatgagcgaggaggtgaggctggggccaaagatggggaggccaccttgtaaggtgaagtggggtgcagctcctcagcctggaacatggatgataatgggctggagaagccggcctctggagaggcagagtccccagggaagtggctctagggagaaggctgaggcagaggccaggggagggggcacagtcagaatggggagcaagttgtttgataagtagggttgcagataaaatgcaggatgcccagttaaatctgatttccatacacacaacaaaaaacattttagcatctgtgtgtccctaatattgcatggatgagtgtggcaatttgggtatggacagagaagagggtcaaaaccagggagatgtgtgagatagattgtgcttaatggtttaattattatttttatgtaagttcttttatgccatacatagggcaaaaaaagaataaatcagaaaatgagaaaagcacaaagatgatttaaaagcgcgtccacagtcacctaacccagaatgaactgccattaacctgctggtatacattaccctccagcttctagagtctggggatgccaaaaggcacagcacagggactctggtcccctctgaacttccatctctacaacaatgcctggcccacggtaggcgggcaatacatttttggtgaatgaataaataaatctttctaggctttttttttcttatacatatataactgcatttatccaattatcatttttataaaatggggtcatcctatacctattatttgaaatctattgttttaacttaataatagatttagcgatctttgtggaaggttgattttgttttttaagactgtggggactaacacacattcacacattcacagtctgccgcggaggaactagagatgatgcaggggcagaagcaggagatgtaataactcagggaggccggtgccctaatcaagaagagtccaataaaaacaggctaaactcttcaaacaaaagaaatatgtggcttgcagtggaattttcaaaatgtattaaaaaaggtgtaaaatgaaaactgcaagtctcttcctaccccgaagccttggttgcttccttcaaacagaatcactttaacagttccttgtgcatcctcccagaaaatggtttcatgccgatctctgctattaaagtttttttttttttatgaatgcaatctttctatccacatcgttttgcattttgctttttacacttaaattgtcagagatagttttccatctcagacttatctcttatggaaaagacaaaatagtattccattatttagatgaatcttgatgtagctaagcaagcctctgttaatggtcatttaggttgtggtacacacacacacacacacacacacaattatcaaaacaacaatacattggacatccttttaaatatgtcttggtataaatattgtgggtctccactggagaaattcttaacagaaaaattgaatatgcattaatatgtcaatagatttggccaaattgtcctccaaaaatactgtttcaatttatcttccatcggtgatgtacaagagtgcctgtgtccttagatcttgggccacactggatattagcaaatatagaaagcaaagttttcatttttacaagtctaacatatgaatattggaagggaaatgacaagttaatgaaggtttgtggttaaccgcacatttttgtgcctacaaataaacaaggggtgcaagttaatcagcatatactccattaacttggattcttacccttctgtttattttcactgccatcactctggctcaagtcaccatcatttttcagatgaaaagctgacaggggcctctcgctgtttccctggcactcactctggcccctgtaattcattctccacggagcagcaagcatgatctttaaaaaatgcaaatcagcattctgcttctgcaatacagcttatctgaatattctgagggccttccccactgtgcctaactagatttggtataaattatactttttcataaagtagggaagcctctgagttctctggctcccaaagtgagcttaaggggggcctgcctgtagagcccctcctgaggacagatgtcaatgtcttctttgactgtggcatgagattgggcagaccagggcctagagtggttccaagctgctgatgcccctggctcctgggagaagcaaatataaataatccctagaagaaagcattattattttcaattctaagatttttcacagatcaagatcaaataaatatgagttctcaaaggtcacccaatacacaagtaagcaatccactatggagtaagagttggcagaagcaaaaaatgaacatctcatgaatatcagatattggaattatctatcacagaatatagaataatatacatgaaatgtttaataaagtaaaacatggaatttaaaaattgagcaaacagcatgagcctgtaaaaatgaccaagtagatctggaaaatgaacaaataaaactttgagaaacaaaaataacgttgttgaaataagaacttagtggctggttcagggagcagattagacactgttgaaaaggagattagtgaaatggaaaataggtgtaaagaaattacccaaaatttagggaaaaaagagaggggatgcaaactaagacaaagaggttaagagacataggagctatcatgagaaagtctaactaatgtcttccataaagacaacaacaacaaaaaagaaagagtagaggagatgcaattggtgaagaaaatgtctaacagttttccagaagtgataaaagacaccaaactactggaagcacagtgaataccaagtgggattaagaaaaatccaaagaaataaacacttgaccctgcaaagcaccaaacagaaagtagccgccaacctagatttgtgtacccatcaaaatactcttacaacaacaagggcaaaacaaagacattttcaaataaacaatactgaaagtatttatcactctacactctattaaatgaccttctaaacaaaggaatttactaagaaggaaaatttactggagggaaggtttttttttttttttttttttttttgagatgaagtcttgctctgtcacccaggctggagtgcagtggcacaatcttggctcactgcaacctccgcctcccaggttcaagcaattctcctgcctcagcctcccaagtagctgggattacaggcacacactaccacgcctggctaatttttgtattttcagtagagacgaggtttcaccatgttggccaggctgggaaggtcttagttttaagaagaaataacaagcaaagaattggaaaatgtaattctttaaataaagaaataaaatgataccctctaattttgtggggttaagaaaagaggaaaaggacagaacaaaaatactggaaaacagaagtatgtaatttggaagataaatgattaggttactgttctaaatttcttgcattaatcaggagaataattaagatattataatttcaagagttagctgctaaaataatagaagcattgtgtaacttccaaaccagaagaaagaaagataaagtaataggagtaagtataaataaactaattccttaaatattaaaaaaaaaaaaacaagaaaggaggaaaagagcataaaaagtatagtttgtgggaaataaaacatggttaaaaacaaatatgaaaaaatgtaaatggatttaattaccaatcaacagagattatctaattggatttcgaaacccctagctatgtgttatttataacagacatacttgaattatagggacacagaaagtatgaaagtaaaataattcataaaacttgccaaatactaagtaaaaggaaactgggtggctacatcaaaatcaggtagagtaggatacccaataaaaagcactattagggataaaggtggtcactccacaaaaggtccaacctgccaagaaaagatggccatatcagaacatacaaagcaaacattgctatagctagagggaaatgttgacaaatccatcgttataatggcatagttttgcacaaggcttctgattatttatagaccaagtagacaaaagatcagtaatgacaccaaagcttaaaaaacacaatgaacaagtttaattcctttcatatatatgtgcgtgcctgtgtgtgcatccgtgtgtgtgtgtgtatgcaagtgtgttgtgtaagcatagtgtatacagtggtccccccatgtgcggttttgctttccatggtttcagttacctgcagtcaaccatgatctggaaatattaaatggaaaattccagaaataaacaactcatacattttaaattgagtgctgttctgagtagcgtgatgaaatcttgcaccattctgctgcatcccaccctggatgtgaaacccccttttgtctagtgtatccacttatacactacctgccctatacaatgcaataataggaaaaaacatagtatacataggatttggtattatccacagtctgagacacccactgggggtcatggaatgcctcccctgaggataaggggggactaatgtacacacacactcacacacacatacatatatatattactgtgtccaaaaattagagtatgaacattcttttcaaacacatgtgcaacatttacaaaaactgtccccatactaggccatacaatgtctcaacaaattcaaataattggtattatacaggctacagttctgattacaatgcaaagaaattaaaagccagtaataaaaatatttcaaacatttctatgtgtttggaaattaagaaacacttcccaaacactcaggcatcaatggagaaatcaaaatcaaaatcaaaagaacactgatcttagaactaagcaaaaagtgaaaatagtacacatcaaaactcatggaatgcagataaatcaatacttcgaggtaaacctataggcttatgagcatattgttaaaagaagaaagcctaagaattaaagataaccgtccaatttaagaagttagaaaaagaaaaatcaagtaagcccaaataaaggagaagaaaaaagcagacgctaataaaatagaaaacaaagctagaagagagaatgaacaaggtccaagatgcttctgtgaaacccctgagagattagatcaacctctgctaagactgatcaaataaaagaaagaaaggaaaggaaagaagagtgggtgagtagggggaaaagaggagaggagagattaatactattgagaatgaaaaacggacaaaattacagatccagcaggtttttataaaaaaagtttatgatccaatgtgtgtgtttataacctgaatagttccataactgttgaagaaattgaggagtaatttaaaaatctgccccctgccccaaacataacccaaaccaacaccaaacaacaaacaaaccaaccaaaacaaacaaacaaacaaaaccaggcagaccaggtgcagtggctcacgcctgtaatcccagcactctggtaggctgaggcaggtggattgcttgaatccaggagttcgagactccagcctgggcaacgtggagaaaacccatctctacaaaaaataaaaacaaaaaaaaattagggtcaggtgcggtggctcacacctgtaatcccagtactttgggaggccaaggcaggcggatcacgaggttaggagtttgagatcagcctggccagcatggtgaaaccctgtctctactaaaaatacaaaaaaattagctgggtgtggtggcgggcacctgtaatcccagctactttggaggctgaggcaggacaatcgcttgaacctgggaggcagaggttgcagtcagccgagatcacgccactgcactccagcctgggcaacaagagcgaaactttgtgtggaaaaaaaaaaaaaagaaaagaacaaaatcactccagttttacataaactcgtccagaaagtagaaaaagggtgcaatctccaactcactctgtgagctcttagtatggacggcagatctaggttttgtggagcctgaagtttattcaattttgggggccctcttaagaaaaagaatggaaattcatacaaaaattcacaattggcataaaaataaatatttaggatgggaaaattaacaataaattacacattttataaagctgacacgtaccacaaacacaataaaattcagagaactcatatattacttttattactcaataacttgagtcttctatgataatgttttcctacatgttttagattgggttggctttgcctcttcatatgacaaagatttcatatttttattttctatggcaggaggtgaaagtccacttattctttctttgttgattaaaaatattttttgttaccaatcattcagaaagtttctttttcagcttaacaactcattattataatgtcataagtttttaggattatcaaatttggaaaacttctatgaagtttctttcatgtataagctatgagatttacaacaactttccctagaccagcttctggttctgcacatttcacgcctgtctctccactgccccatggttctagtgattggtgctgaggacacattcatggtgcaccttcacaccatgacagcggacaggtaggagagtgagaaacaggggtatttggggaagcctgtcccacactgacctcgctagcgagaacttaacgacacatggaagtggctgcataacacacaaacttacggcactaactaaaagaattcccaactcaacctctctgtaagctgatcccccaagtgccagcggtcacttcaacattcacagcaaaaggcagagtgtgaagaaccagtgaaagaaccagtgaaagacaatgtgggaagagactgtctcttcactgattaatgttgaaatatgctatgttttcaaaaacttaagtccatgtgaacacattgctaaggttctcacactctatatacccttccgggttttggaaagcactcttgcaagacagagaccctgaatccttttgagggcagtgtgaaaaggaaaaattaaggacagtatgagagaggaaagttataggccaatcgcatttatggacatggttgtgaaagtcgtaagtaaaatatgagtaaatggaatgtaaagataacacattatgtccatgttgggtctatcctaataatgcaactcattaacattagaaaaatctgtaaatatctttgccacattcacagattaaaagatctttccaaagatgcagaaaatgcatttgataaaattccaaacccattcgtaatttaaaaatgagaaatagtttgatatgtatctatgctgattaagggcactgtgtaccaaaaaagcctattctaaatgatatttcttagtgatgaaattctgaacttctgagatcaggaataaataagacaaacatgcctccatcacaatgaatgacaatgactttcaatgttttactgacagtccttgcagcaaaacaagaaaaagaaataaaaggcataagtattttaaaagaaagaaaatgatcactatttgtagatgatatgattgtctatgtaaaaactcaaaatctacagacaaattattagaaataatgagagtgtttagaaagatggctggataaaagaaatcaatatgtaagaatcaattacatcttgtaacagcacatagttgtggggagggaatatatcatttacaacagtagtaaaaaatataagatacctaggaataaattttataaaaatatgcaagatgtgtttggagaaaattattaaaatttcttgaaagacattaaagatataaataaatgaagtgagatatattcaaggatagacaatattaagagatgtctaccttctacaaactggttcacaggtataatagattccagtcaaaatcccaacaggttatcttatttttttgggatcttgagaagatggttataaaatgtatatgaaagagcaaaggtgtcaggaattgaaaaatagtaagatatagggacgtgttgtatcagagctcttagaagatttattgaaaactcgagtaactgtagcattgtatattctgtgaaaagataaacaaattgaccaaaacaatagaacagagagctcagatggtgactcctgaaatttacagaggcttgctagtttacaggattgctgctaagtggagaagagagggctggtcaagaaatagagccaggacaattggttatccccgtggaaaggaaaagaagtcggttcatacccccaaatcaacttccaatgggcggggggaggaacttaaatgtacaaaaagataaaatgctaaagcttttagaagaaaatgtagaagaatatcttatgaccgcgagctagcaaaggatttcttaaaatgcgcaagtgcagaaagcacagaaaggcaagctggtaaatacgatcctattaaaatgaggaacttctgttattcaaaagatatcataaagaggatgaaaagacatctacaacacacatgaccaacagaggattaagatacaggttgtgtaaagaagtcctccaaatcttaaggagaagataaatcataccagagaaaaatagatgttaagacacaagttggtatttcacaaaagaggaaatgagagtggtaaataaagatatatagagacgtcaaatgcattaatagtcagggccgtgcaaattaagacccaatgaggctatattctgtacacactggattagccaaatttatgaattgcaaaaatagcaagagtaggtgaggaccaatgggaaccctgcccatgggagcataaactgggatgaatacttagtaaaataacttttgtaagttaactttataggcatttacagcatgagatcagtggtttacaaacattttctgtgaatcacaatcagaaatacatcttacatcaccatctgatatatacgcctgtgcatacgcatgcactgacacatacagacacaatgaaaacatgcacaaacacatacacatgcactcacacacaatgcaagcatgcatacatgcacacacatgcactgacacacaatgcaagcacgcatacatgcacacacatgcactcacacacaatgcaagcatatacacacatacacataatgcaagcatgcacacatgcatacacatgcactcacacacaatgcaagcatgcatacacacatacacatgcactcacacacaatgcaagcatgcacacatgcatacacgtgcactcacacacaaggcaagcatacacacacatacacatgcactcacacacaatgcaagcatgcatacatgcatacacgcactcacacacaatgcaagcatgcacacacacatacagatgcactcacacacaatgcaagcatgcacacacatatatatgcactcacagtgcatgcacacaggcacataaacatgcacataatggaaacaaaagtttcaggaaacaatattggctcttactatgagacatccactcccaagtattctcttctctttcattaagaaaagacactggttgggccccactaatgtgagtcatgagccattaagagatcatgactgtgattttggtaactctagcacatttacacccagcaacaagtccaagaaggttcctaagagccttatttgtaaaagccaaaagctagagacaaacgagatgatggtagatagaagaagagaaaaataacttgcagcttcctcacacattggaatattatccagaagtgaaaatggaggaactacagccacacctaatagtgtgctcacaccttagaaacataatatcgagtgccaaaagcaaacacagaagaatacatacagggagctatgactttcatcaacctcaggaacaagcacagctaaaaaaaataccccgtttagggggcacctgtaccctgaaaaaaaaacaaggaaaagataaacacaaaattcagaaagggagaacaggtgagtggacaaagacatgggcaacgttgtgctttttgggatgagggctgggctcacgggtgtccacattatgttcacagctgacctttaacaacacgacaccagagttaggggcaccagtgccccacacagttgaaaatctaccggtaactttcaactcccccaaaacctaactattaatagtctacagttaaccagaagcctaactgataacatagtcaattcacacatattttatatacagtatgtattatatactgtattcttacaataaagtgagctagagaaaaggttattgacaaaatcataaggaagagaaaacatatttaggattcattagctggaagcggatcatcataaaggtcttcatcctcatcaccttcatgttgagtaggctgaggaggaggaggaagaggaggggctggtcttgctgtctcaggggcagcagaggcagaagaaaatctggggataagtggacctgggcaggtgaaactcatgtggtttaagggtcaactgcatttcttttttcttttcttttcttttcttacttttcttttctcttctctcttctcttctcttcttttcctttcctttcttttctttccttttttcttgagtcagggtttcattctgtcgcataggctagagtacaatgggatcggctcactgcagcctcaaactccccggctcaagccatcctctggcctcagcctcctgagtagctgggattacaggtgtgcaccactgccacactcagctaatttttaattttttttttggtagagatggggtctggctatgttgcccaatctggtctcaaactcctgggctcagtgatcctcttgcctcggcctcccaaagcgttgggattataggtgtgagccactgtgcctggctgtcaactgtgtttcaaagtatacatatactttgtagtcctcaaatatctaataaaaatgcacatttgatcaagtcagtcctgttgaaagccccttccattctgaagtgctacgagccccgtactttgcctgtgattcctgtctcacgatcatctcctggcattctgcacccactgagcgcctggcagtcccttggccacaccccacttgtacccaccctggggcctgtgcacttgccggtctgtctgccaggaatgctctttttgggccttctggctcattctcctccttcagctcaagcgtctcctcttcagtgagaacacccccatgaccttgtctcaaggtgggccctctggtgtcccctggagcctgctgccccctgcactcctccataaacaatagtgggtcactgcctgctggacactggccccaactggtgcagattggacgcttagtgctcacatgcctccttcagccaaagggagggctgaggacacctctgtctccctcaacttgtcgtctgccaaccctagtgtcgtacctgccagagtcacacgacaaatatggagctctaggaccagtggcctcgtttgagggcccagtgcaaattgaaaatacacggccccttgttcaaaaagttttaagagtttcaagacgatgatggcagagtgttaaggccagtgtggggcccttctgagtgtgggaccatgtgcctgactgcatggatggtgtgcccaggaagccggcccttggggccagatagaagccttatcaaacgctgcagggctgggggccacagtggcatggccttagtctgaatgggcctgaccttctaggctgagctgcctccttgagccccagaaacacttgctcttcaacccccctgtgccccgagggcagggacctcgactgcatcctccagaggttgaagcccaggctgaacccaacacgtctaggttggaactcaggccctgccccttctgagtgaggtggctttgggtaagaagcctcagtgccctcgtctgtcgcggggtcagagacatgtttgggggaaaggggtgaggtgggttgagagcctcaccgggggtcgcacacacatgaaggtgtgacccatgccatcaccacctcctgtagcaacacagaaccagaaacctgtgcctgccacactgcgcccggcacctggctggggtccccacatgcccttgtctccccagctgctgccagggccatcagcggagtgggacccagcctccccaccctccagccttgagggccccgggtccccctctccaggctgggcccctgtgcccacatcccccatccttggcctgagttacagagggggcggtggctgcgcttgaggccctaccccattgagggtcaatgacataccgtctttaggataatttttatgagcagatgagagcaggggcgtttctattcagtccacttttcctagggttaatgagttcaggttggttttctgaatcctaaaaaaggcctttttgtgtgcacagcaactgctttattcagccataacctgtgcccagcctgggtcagctgtgggagaggctggggagggactgtgacagtggggtcagaggggctcgcagtgggcagggagccaggccccaggcaaatggtcctgttggtgccagggggcacctgctgtgcttgccagaggctgtagcagcccctcatgggcaggtgccagcctggggcagggttgtggcccaatgagacagcctgacgcctgcccccaggccaggcagagggacagacattgctcaaatcatctcatggatgaaaacagaaagacaaatactgactcagtgcttggaggaagcccagcgagggggctgcctgagtctgggagatcagaaagcccacctgggaagcgacaggggagagaaaggtgggctccgtgggcctgagcaacggcaggtgcaagggtcctgaggtgagtgggctccatgtggccaaggaagacacagagctaatgtcgggggtcagcatggggcagacaggccgggagggtgcaggggccagagcaggccctgaggctcaggtgagctgggtggtttggtctttatcctgacaccagaagtccttggggtgttacaggcagaagctgcaaggaagagtggaactgtgcatgggagagtggaggaaggccgggagaccccgaggggatgcccctgagggggccaggccagggtgggtgaggcctgagcctggcatggaggaaagggaccccctacgagcggcactgaggaagagtggtcagttagactctggccagtgtccagtgaaataaaaaacaagtaactcaaactatgtaaaaaagaaaagtcgcgatgcaaatttgcatatgtatactagaaggtctgaacttgcagacaccggccagtgacaggggccctttgaggagtgaggccatgcaggggacagctcgagaaagacagggctccagggtcagcagcgtggacaccagaggtcacaagatgggggatgaggagggggttggcgggagtatgggagctggtgaaaggggcctcctgggggtgagggggcatgcagcgggtggaggctgaggggcagatgcgggtttcagggaaggaagctgtagcacgactgaagccttaggcctggccacagctgccctggaaagtgggttctccctgggggagtctccctgccatggggagagggcccactaggaggcccagggaacagacgccttgcatcgtgtccacagatggggtgctaaaacgagaggaatttacattctcatcctgctggaggccatgagtctgggctcatgagtctgggctcaaggtgcgagctgggttggttccttctgaggctgggccgggattgttccaggcctttcttgtggcttgtagatggccatcttctccctgcgtctcttcacatcgtcttccttcgacgcaggtctgcgtccaaatatcccctttctatgaggatactagtcatgctggatgagggcccacctgaatggcctcattttaacttgatgacctctgcaaagaccctgtctctaaatgaggtcacacatgctgaggccctgggggtcaggacttcaacatatggatttgggtaggggacacaattcaaccggcagcacttactgaagatcacatggctggtggagaagggaccttgtgcggcctctattaatagattctcatattaaaagctaagtctcatgcagagaagcagaattccctgtacacacacctcaatcatttctctcccttctcggcagcaacaaccattatcggtttgtgcatctctccagatcttttcctctgggggcatatgcataaatatatgtcccgaggaggggtgcggtggtgggctgtttttaaaataaaattcaaatccctgttatgatgaaaaactggctaatgaaaattatgtttcaaaacagactgaggcgttttcatgctaactatggcgttctttgtctcatttgcaatggaaaagtcccttgtttcaaaaaaatacattattaagaggccttacaatacaaaccacattttccaattcaatagtgtacaaggtcagccaagcaaagacaatgcaagctagcttcaaaagcgtcttgctaaagagtgaaatttgttcggaagggcagcattctaatccaagccgtggggtaggctggttgtggcgttgctgaaatttcagcctccaaaatgaaccccttcggtaattgagaacctattaaaggagcttaaatgcagtttcagatattgcatttcctgattaacaaggatataatttcttgaagaaagaaagaaaaaaaggattctgttaatatcattggttttcctgaatcggcccttgtacaggaagaaaggccaggggctgctggcctcgggggaagctgatagggaccacttgggcgggaagagggtgttgagggcccggcagggcagagggaggaggtccgggagagtctgtctggcctggccacctgagttctgtttggactttgagaccagctgaagccacacctcccagcctgataaccttggcctccacctgcagtcagcctccctggttgcgggtgctgagctagagccatctctagaaaatgcctcctcctcctctgtccaaaagctcctctgtcattggagacacatccccatgtgccctcatggcgggcatcatctgcagcccctggcactgcttttggccccctgaggccatgggcacctgcctcacatctcttcctcccttcttggagtctcatctccatcccacgtctgtgggtggctggttccccccttggctgcagaaccctttaacttctcatttcattccaataatgaggacacaattttggctgctctgatgcagacccacagtaaaagtcaccgcagtgaggtggaacttgacttttcttctgcgggagggacagttggggccagtgcgatggctctgcccaggttccttctggtgtgtggctctgcctcatccctaggtgtgaccttcatcggcatggtccagctgagctcacagcaggtctgtatttctaccaggggaaggaaaacaggggctgtgtgtcctcctggtggccacactactggccacacctagctgcaagggaggtggggaaaccttctaccacctctggacggccacatggccagctaagacagggctttgccacagtgagagaggacgggaatggaacccaagggaagcctgcagcatccccacacctcccctcagttgtccacacctatggcgacacctgtctaggaggaattttctcctgcaataaccctcagcctccagtttcccagtctcttctcatgccagccttacctctgcaatttggtctcaaaaataccgatcaccccattcccacttccttgccctcaagagctgttggattgggcaccagaactgcccttggacaagctgtggctccttcctccctccatccacctcagtgcccttcccaagcacgttcataggaaggggctcctggcccctacctgctcctgctctgtgggcaatgccccttcacaccctgcttccaccccaggacaatggaactgcaccctcagagggagggcacccctgtgccaaacaccccacccatccctgtctctcctctctccagcttccctccctagccccatctccctctctgtctctcttgagtcttcaacctcttttttttctctcataagtatgcaaacctgctccactgtctctcaccgtccctggcctccctttgttcatttactctttcaacagatattttgtatgtgtgcctactacagactgggcacttccatctcacaccaagattgtttttttaaaaaaacacatgtaaatattttagttttcaaatagagctggagcctagaaaaacaaaaacaaattccaaagtgctctacactgaacggcataaggtgaagcttctttctccttctaccctagtccctccctcccaaagcaaaaattattatcagatttttcagcattttttctgggggaaaatgcatatgtgaatttaaagcactctgttttgattttttcacttaatttgtagagacagtttcccattgacacaaagtcatctttctactacgttctctttctggctgtaagatgttcccatctgtggacgcatcacaacggattcagtcagcatctaatgaggggcatgctgagtcttctggcatttgctaccctcccaccccaagcatgaacgtcaccagtgggatcccgggggtcatatccggccccgctctgggccaagggcatcctgatggctctgtttgtgttcacctctccatccccagccccagtcctgcacctggcccatagcaggtccttggaaatgcttgagaatgaagcttcacaagctacttgccatattctctcatttaatccttttggcagtgttttagtgttttgagatagggaagtgtcatgccctctctttacaggaggggacaccaaggctccttgtctctccctgtccacccaatggctttcctttcggctcacaccctcaccacagccacccacgctctgaggacatcccatccttcctccaggccacacctttgactacccccggacattcatcctggctaaggaagccaccgtctaccaggaaaacccttcgctgcactccccactagccagttgcccagtccagggagttttgccttttgtgggctctccaagctgtccacttcccccagccctcccactcctccagatgcaccccagctttgggtgaagccatcaatcctggccactgctacccaggctccctgagggttagcactctgccaggtaccccacagtgtgacatgtgacatgcccactttaaagatgaacccctgggaacccctccttgaggctaagatctggaatactaccagtcttattgaaaccttctgtcccatccccaggggtaactttagtcctgaagtttggacaagtcattcccttgaatgattatgatggaccagatagtctacagtgtctacctttaaatatatttcttttcttgtttgtaagagcctctgttggtggctgaactgtattctccccaaattcttatgttaaagctgtaaccccctgtacctcagagcatgactgtatttggagacagggcttttaaggaggtgattaagtcaaaatgaggccattagagtgggccctaatccagtctgactggtgtccctgtaagaagaggaaatttggacacacggagagacaccactgatgtgtacccacagaataatggccgtagagggcacagctagaagacggccacctacaagccagggagggcaggctctgcagaaaccaaccctgcagacaccttgatctctgacttccagcctccagagctgggcaagaaagaatttccgatttgtgtgaagccagacagtctgtgttctttgttatggcagccatagaaagcaaatacagacctcccatccagttcatctccaagtcctgacagttccacctccacacgcacaggggaagggtctcacctctctctaaccctacagatataaccaagccactgtcaccactttccatggatgcatttccactcagcaaccagagagcctttttgagcccgaaaacctgcctctggctttccaaagcccttaagcttggctgtgaccctcttcatggcctgctcatcctgtcctcttgtccctttactctctagcagccatcctgactttccttcagttggttcctctcatcctggatcttctagcgctggctccttttcatctcttaggactgggctgcaatgtggcctacttggagaagccttccagatatgccccatctaatagcccacctccctggtcactctccccactccctttctcctctcctctcacagtgcttgtcaccatctgccattgtcttgtgtttttttgttttgttttgttttgagtcagagtctcactctgtcacccaggatggagtaccctggtgcgatctcggctcactggaacctgtctccagggtttgagtgattctcctgcctcagcctcccaagtagctaggattacaggtgcccaccaccatgccaggctaatttttgtatttttagtagaaaggaggtttcaccatgttggccaggctggtcttgaactcctgacctcaagtgatccacccgcctcggcctcccaaagtgttgggattacaggcgtgagacaccgcatctggcctttggtgtatttgttttctaatctgtatgtcctacctctgccccataccaccaactagattgcaagtcccataaggtccatgccaggctcattttgttccctgttataaccctggggtgtagaacagtgccaggcacgtagtcagcacccactgaatgcttgttgaagaactgaatacttgaatgaagagacattctcaccactgagttgaagttataggacgttatctacaaacatagtaaagacatgcttactcatttaagctctcctaaattagaatttgaagtagagagagaaagaagtttgtctttgtatttaagcagaacaaaaaaaaaaaaaagaaaagaactttctaagcaaattatctatgtaaacagggaatatgtttcgcccacttaataatgaagtccagcagctctggtcgcaaacactcttagaagctctttagcaataaatatgcaaattacaaattattccacgttcttgttgaagctcttacagggctctagagactcaggggcccaacctctcttccttaggtccccgtcagcaacaataatgaatgtcctgggtggcagtggacgtgactctttttatgggaccggaattccgacttttccggaagtcaggcttcccctaaccaccatcagaggcagaaatgcacgtctctgaatttccctaaggcagcatttacagtccctgaaaggttgggggtggggtttcctagcaaaatgcagctagccacgcaatcatgtaggttatgatcttctcagagattttgatggttaccttgaagtgatttcctgcgagaggcagacggaaatgcaaaagtattgcaagactgtgggagaaacaacaaatccaaatgctgatcatcataaaagcccaggtactttcactcactggcaagttggtcttaatttcagtctgtggtttgctgttaaggaaattggagtccatcagaatttggttaaagctgatgggccaaacagtagacttcagcttcaaactatctagaaaccacacccaaccatgaaaaacacatgttaaagcaactctaagtgtacatttcaaagaacaagtaattttgtttcactatggccactggtaattccaggctaaatacagccatgtcgtgctctcctgtatctacatatacttttggaaaagagtagagttgggtatgagctattgcttttcctccctctttctatatgatttaatattgaggcttggggaaggcagctcagattttgtttttaacgcacactgagctctaggggtagtgaaaaacaggggtgtacagcacatatactatttagctaactgttcagagggcatggtctcaaactttgtaggcatataggttagctgctttggttgtaagcaacagaagcaacatctgactcatgtaagctaaaaagggacttcttggatgggcatggatccaagggatgctctgggagtgcagttggtgggaaccactctgcactttctccaggacactccgtgggcagaatgtgcttagcttctggtcactgcccttaaagttcaaagtcctggagcaagcatcccatgagcccatctggagactcacacctcaggtggagatgaagcaccttgactgacaagtcctctaggactggagtcaatgaaattctgctatagcaaaagaaggaggaatggagcccaggcaggcaaaactggtacctgtccactgcagttttgtttctagcagagaaggacttgagatgggggagaggagacagcagattgctcagggcaaaggctccatggctaatggtatcaacaagtagcccaatgcatctccctggctttggtaaaggatccaatcttccctggctcttctctgtgatgagcaagaggtcttcttgcctctgagacaaccatgtgaacagactgttagcacctcagggcccccagggagcagtgagttctgggcttattgggtctgccctttcacgcattctggatggttcctaagcagccatgaggccatcaggtggcagtcttcccaggcttctgcttcttcagaagcatcctagcccagtagcgtctatttcttcaggtgtcaagtggtgataaatagcagtacctaaaccacaagacagttgtgtagaaataatataatgctcctacagtgtttcataatggcaagtgcccaatggacgttaggtattgctgacattgatccacccacagctacagtgtagcctcagtcaccctagtggggttccagttccctgttctgaagccccatccacaagactgagggcacctttggcaagcacctctcctcacagcagggagggcacagggccttatctaaacatctagatgtttggggccccgatgttccccaaatccattcccaggaacatcgatctgcctaagagcatctggactacccaggacccccagttctgtaggtgatcccacttctgacaccaggaccaagtcctgcagccaggtcaggtttcacttctccaacctcaacctctgttacatttctaaccagcctctcttgctgaagtcctagcaaattcaggaggttacaaaactgtgaagctgtaaacccagctcttttccttgaacccccagcctcagatggaactgatcctatagaaaatacagagaaaaacatagagacaaagaaagaattttctcataattccccctcccagagataactgctcatttcatatgttttcttttttttatttaaaaaaaggatgcctcctccatgaaaacataattagaatcaaatatactatattgtgtttctttttaagttttttacaaattattattatttttattttttgtggagacagggtttccctttgttgcccaggctcatcttgaacttctgaactcaagtgattctcccactttggcctcccaaagtgctgggattacaggcatgggccactgtgcctggctcattgtgtttcttgttctaacattatgtcataaatatcctcccatgtcagtccattttttttggatatataattttttatgtatgcataattccttcaagatgtatttaagtcattgcctgttgttgggtatttaaattttggcctcctgacctcccttccctctctggaaccctggatatggtttggccctgtgctactcacctttcaactgttggatgatcatgttacttctcaaattccatttcccagaaacacctggtgccatcccacccaccagagtgggccctttggatacaacactaggcattttggacagaattgcaacactgcaaaatatatgctgaagtcctaactctagtacctcagattgtgaccttatttggaaataaggtcactgcaggtgtaactaattaaaatgaggtcctactggagcagggtgagccctaaatccaatatgactggtgtacttattagaaaaggagatgagacacagtgatagagacacacagggagaagaggtccacatggcaatggaggtaggaactgaagtgatgggtttaaagccagggaatgccaaggactgctggcaaataccagaagctggaagaggcaaagaagattcccttctacaggcttcagagggagcatggccccactgataccttgattttggatgtctgttgttccaagccccccacttcatagtactttgttatgacagccccaggaaacaaacacaaactccccaaatccccacttcccagaaacacctagtaccgtcctagccaccagagtgggccctttggatacatccccaggcaaaagcaacctgagtccccttgcacctctggaagcaggaatttgggcttctcacctctttacccttctgtatacccccatcttcctctgacccatccagacaccatttctgtctctttctctccagccaagctcctgatatcccagaaggagaaggtggccttgtagccacccagaagaagcaatgtagcaggtccaaaggctggaatctgtagggcagtgtcctgtcacctttgcaaatggtatgagtgacatctacggaggacttgctctgtgtctgctgtgcagtgaacttcccacatggacactcttatctactcaagcagccccatgggttaaacatcattttgcaaaggaggaaactgaggcatggagggattaagtggtggggcagtcaatggagcagctggaatgtgagcctgggcaattgaattccggagcccagcccattctgcagtctttgcagatgaacaattaggatccttctctcttcaacaactctcagattaacatttaattggggttttaaaaagctgttcttgttagcatgtctgtggtcttctactgcaatcttccccattaagccatgttatataaacagtcagctcagatgcctcagagtgtgtgtgtctcctggtgcccagattttgctttaattcatggtgctttcaaaggcatcagggcagggaggtatttgcatgaacttggagctgaactttcactggagggtggcagttgaggcaagaagcttggtggtccacaaatctgggttgctgggcttgctggctggatgacttgagtgcctggtatctgatatggtttggctgtgtccccactcaaatctcatcttgaattgtaactcccacaattcccaggtgtcatgggaagagcctggtgggaggtaattgaatcacgggggcaggtctttcctgtgctgttcttgagatagtgaataagtctcacgagatctgatagtttttaataaaaggagtttccctgcacaagttctctctctttgcctgctgccatccttgtaagatgtgacttgctcctccttactttccaccatgattgtgatgacttcccagccatgtgaaactgtaagtccattaaacctctttcttttgaaaatagcccagtctcgggcatgcctttatcagcagggtgaaaatgaggtaatacaatgtccatggcatagagaggttgtgaggatgaaatgaagtaatgtgctagcacagtgttctagctgtcttttttctctgaggtaagttggtctttctccctctccctgactctttcccttcctctccttctccctctgccacatacgcacacccacccacacccccacacacacaccccgacacacacacagtggtaatttatggtaggaatatctgaccatctgttctcccctctggggaatatatacacttgctaatagcccatgcacccttgcacaggtttcaatggagtgaacatgaaagagaagagaaacagcaacttctgtttcaggaagcttgggtgaaaaaacagcaagctgaaaaaaaattgcaacacatacaagagacagctagttttctgaatataaagagcacttacaaatcaataagaaaaatggtttgaatctcccatatgatgacagcacaaacatgtgaccaggcagttcattggaaaagcaatatgagaggtctataacacacaaacatttgcttctccttgctcataattataggaatccaaatcaaaaccaccaagcattgccactggcatgatttttaagaagtaataatacaagggttagtgaagatgtaagaaatgagtgctctcctaggtcacccatgggggtggtgctggtacaactcatttggaaaaaaagctggtgggagaatttagcaaacacactttgccacggcaattccactgctaggtatttccactaaaatttgcaggtgaaggggaggctggcagcagggaacagagttctaggcagaagaaacagcctatgcatgcatatggaggttgtggtgggaaggaatgcagctgatggacaggctggtgggctctgagtgactgcttcatggtggtgcttccagcccagcagccactatcctccctaagaagaaagagaggttatctgtgaagtgtgtggagatgactgtcacatggggatcaaggagcacagggaggggagagcacagagagagtgaacatggctgagactgtgtccataaatcaagagagactccagctgatgtgctttacatcttgacagcatacaaggcttttaaatctcaaaatgccccctgaagtggttgacatcctcgattagatgttggcattggtggtggggggaagagatgaggacaatggagcagaggactggcggaggggaggtggctggggaggccctggaggagctgaggagggcctctgcggcagggcccttcagtgcagctgtgactggggttcccgtctgccactgcttacactatgttgggtatatgagcgattactgagtacctactatgtgccaggcactgttctagggacccgggaaagaactgtcgataaaacaggccaggccttcttcttgtgcagcctactttgtagtgaggaacagactgtaaacagggaaacaggtaatgataggccacggtgtatggagagtgaggggtgccgtgcagaaaggcagagcggggtactgggaaagactgtgtgcacatgcgtgagtgtgcatgagtgtgcgtgagtgtgtgtgagtgtgcatgtgtgtctgtgtgcgcacgtgtgtgtgcatgtgcatgcgtgtgtgtgtgtgtgtgtgtgtgtggagtcaacgagtcaattttagccttcctttagccttctgggaaggcctctcagagaaggtaacatctgagtagatacctgagtggaagaaggagccagaagaatgttccaggcagagggaagagggcgtgaaggccctgagggagtcgtgctgcctatgtggaggccaagccaggagctgcccaggtagttggtgctgagtgaggaagcaggcaggaccagggcgggccgggtgctgtgagccacgtcagggcctttggattgggctttactcaggggtactaaaatccttctcgtttccctgatgatgaaactgaagacgacactatgatatcaatgggcacagacggtacctttagctttgcctgtccaagtttccagtttgcaaatgagtcttagctatacccctgcctagctctccttgggcaagtcacctacttctctgggcctcagtttcttcatctgtcaaacgggagtgaaaacctccaccttccaagagtgttgtaagacgggactaacaactcacctcaaatgctgctgtaagtcaggagctgagcctgggccctggtggacacagagaaggctcagtaagtatagcccatcactgtcactgtcattattaccaggctctgaatgggggcagggagaagtgagggaccaaaacagccattgatagcacatgtgctggcttacggttagagactttcagggctggaagcaaatctgggccaactcctagccagtgctactcgcatcatccagctagattcttggatgcctccagtgatcgggaattcactacttctagaggcatctcattcttaccctgctttacatccttcagtgaacactccattgctcttaatataaagtccaactcttttctgaggccccacaaccctccaggaaccagcccctgccaacccctgaccttgtccactctccaccccttggtccctcactctcttttcttttgcatctaagctttgcacatactagtccttctgccgggaattctgtctgttctgcctcctcctcattcagtttttcaagttccaggttacatatcacctttctagggaggccttcttgaacctcccagcctgggctagatacccctaaaactgcttggtaaagtgctcatcagtcttgtaattagttgctcatttaagatttagttgccctattttccatgaaggtggggagctatctgattggtccttctgtcttccgcacctcacaccagtgtgtggcacatacacaggagggcacacaatacacgtccactgaattgggactctgtcactgcctctctgctagacaattcttcctcttttttttgtctcgccctgttgcccaggctggagtgcattggtgcaatcttggcccactgcaacctccgcctcccgggttcaagcaattctcctgcctcagcctcccaagtagctgggattccaggtgcctgacaccacacccagctaattttttatttttagtggagacagggtttcaccatgttggtcaggctggtcttgaactcctgaccttaggtgatctgcccacttcggcctcccaaagtgctgggattaaaggcgtgagccaccatgcccggcccaattcttccttttagcaagctcaccctactccagcagtgagctctgtcatcatccccattctgcagataaggaaattgatgatggtagcactggcagcagggctggggcagaatgacaggagacagcagcaagaagggtggagcctggacctgcatggtgtcagggttaaacccaaagaattatgaattttgttgctgttggtatcattttaatagtcaaggtgctctcatggggaagaaaatacagcacctgccaaaaggagacagatgctaagtgacgtgtccaagctcaagctgaaatggcaacttcctgagagcaggggcgctgacactttcttccccaggtctggagactttagagcagcatctgactccctgcagggacagcacagagggttcaccaggttctcagtgctaagtcctggccatataccatcttgttgaacacttccagcactctctgatgtcacagctatcaccattcccaacacactgattgggccacatgcccagggaggctgtgtgggtccaggtgacagaacaggaaggtaacaaagccagggtgggaaccaggtctgcctaattccaaaaccaccttccgtgccaacttcagaattcacttccttctcaagagccccccaactcaacttagctgccctcaagctcaaaccaattttaatggcttctccttccctttgcattgggctattgatcttcattttccaggctggttttggcagtgaaccactgtattttggaagttttatcaggggctcattctggctttaagctttcattagcatagttaacttccaatatattgcaaaaatatttcttcacgtgtagcttctaactgctttgccatccagatggttttgaaatcaaggaagctgctgtatttgcctggagctggttgttttgaattttgagattacagccttggtcagaagataagtggcacagctggccacagtgattcatcttcgagaagcacttcacacagtagcaagaggaagtctccattgataattttttttgtttgttttaagtaactaatacgattacgggtctctattcacattagatttttggatgagtgtatttaagtaattttcttcttagtttttattctgggtttcaaggcagagctccacatcaactaatttattatggaatagcttgtgattttgacctagttaatctgactgtaaatgataacttgccatcgcaaagtatatagcgagagataaaagcagagctgaaattagaaaaaaaaaatacaagttcgaaaaaaaagcagcagctatggtttctcattttccccctccagcataaattgttgagtaatgagatttttaaaagccagaaattgctgtggagtgaaccaacactggcagctggagaactggcaccagacacatctggcctgacagggtttgaaggaaggttcgctgcagtgggtgactacccataccgcagcctggctcctgcggccgccatgcggacatgttcagatacaagagggagggagagcaaatgggaaaaatcaacgtccaaattagaaactacctaagctatgttgtttttcttggggccccactgtgcctttgatttcctgatcgttcagagcaagaataacaaaatccgtctaacccagtgattttgacggattcgtctgaaaaactacctgttgggtttgatctgttcataccagtgattctcaactgggggccactttatcacctggagacatgtggtcatatctggagacattttcagttatcataactaggaggaggtgcaactggcatctgtaggaagagggcagggatactgctaagcaccccaaaatgcacaggacgggcccctcatccccaacaaagaatcctctggtgccaaatgtcaatagcggcgaggttaagaacccctaacgtgtgtgtactcaatctgaattctcttggtggggtggctggtgtgccattatatatatagtttctggaacctggagacatgaagttcaggcgtgcccagctcaggcacctaaattatgtcagtagctgaaggattaactgggtcctgtttccttttactaaagcaaaaggatctcatcacctggtgatgtagccagcggtgaaaagagcttttcaaagaagcgttcagtggaaaatagtgcccggtgtagagctgggagctgcagtggcaggctgaacggcaccctccccctttctggtggctgtgtctgaattgagggcaggctgcccccctctctcgtcaggcccccgggcactcttggcttctctgctgttgaatctgtctgatttgctgtggtgaaaggtcaccgaggagctgggcagcaagactccccaagagccagccacggctctacactcacagtgatttcattggcatgacgggaagctccggcctgccaaagacaacagccatgtgctgtgactgagactgcaggttcctggggcatgtgtcccaccactctagactgttccattcccactgggtgcaacggcctggaggaggcggatgagagcagatggacacccggtttccccatcctgtcctccctatctcagcacccagcagaggcgcgcttccacagctggcccccttgtcaccctttccagtttgcattttcctgccctttcgaaagaaccagcaggggtgaggtggtctattttcatgctgatgatcaactaactctgtggccaaggacagctgtgtcacctctcgctcccagactggcaggggaagcggcccctggatgaatgtccctttcgacaggtgaatctgcaactcttcaaactgcggaggcaccctcccctgaccctccttcagacccctgccagttcttctcaaaacagcttgtttagaaatttgggggctgggaagaaaagactgtgattgaagagctcctcgaggtgacttagactttgctccttgcctatacatggagcagagcgtgctctgtgggaccgcgcagcccctcttcaccccggggttctcggctgccattccctgaacatgagctcagtgccaggcagcaagtggagtgatcctcctgcacgtgctctcgtaatcttcacaatcatcccagacggaggaggggattttgtgagcccatttgacaggaaagaaagtcaaggctgagagagccgatggccatgcttacccaaagccagacgggttgatatgatgttgatctgggcttcccagccaggtggtctaactccagggccagaattctcagccattcataatgtgagggtgcttggggatgagcccccagctgggcacacttcaactgtggttactgtcatttttgtcagtggtgactgggcccctgtgatggcacactccagtcagctggcctttgtacagttttgtctaccctactccccacccccacgaagagccaccagggaaccccttagtcctggagaaggcattgactactctaccaggggttcctgaagccccttggtcccctttgtcaggcctgctgggcacaactcgagcctggggtcactgcgcgctccctagcttctccccgagtcctgctgcaggaagaagccccgaccccgcacaggtcaggattccgtgggcaaaaacaaccccagtaaccttggtctgaatagccgggcttgtcccgcaccatgggggtctcagtgggcctgggatcctcctgcatcttcttggaggccccggtcccactgggcccggcacaaagggcagctctgggtacctacaggccaggccccgactggcgcagagagtgcagcggctctcatattgcgaggtgacgcgactccctcccgcaggccccaggaagctcctggaggcgcgcaggtgccggccaggtgagactggagaaaggcgcgcagggcgcagcatagcagccgcgtgggccgacccagggccgtagtccccaagggcccttaggggacattagacggcgagctccctcccttccgagctcagccagtttgccgggtgggggagggtggcacctacctcccaaaagcaccaggacgcaagcgtaggggagcatggctgcgggcatcccgtcggggctggcaggaccgcccgccgggcgctgccacggtgcgcaaggggaggcgcgggcgcagggctctcggacggctgcgggcgccggcggccaggctggagtcctgcgaagaagttgcgagggtcctgcgcccccctcggcgctcacacgcgctcagccttcccggctgttgatagttgtaagcggagctgcgcactcataggtccaacttgccagaagaggtggagacagcccccggcgaggcgcgcacacccgcgcagcgcgcacagccccctggtgcagctcctgccattcagacccccagccctcccccagatgtccgtcccctggccgtcgccttccccaaagtcttcgcagtgggcaaggaggcctcccccaagctctggtcccggccaaggcagagcgatgcgctccttgcgtcaaagcgcacccctagccaggccgttccctggaagggcaagcggggcggggagttcctctaagccccgccagtcctgggacccctgaagtttctattcaggtcttccagctactcctggaaaagtcgcgtcaacttggatcccagcaaacccagaagcgcagtgaaagtggccaacccggtcgcctagaagccagccccggcctctgtctgtaaatgaggccgtcacccgctccccaccacacccaaacgcatctaggcaaagtgtggacccgaccaggcgggttttcctccttctcgcaactcctcctcctgcccccctccctcccaaatctcatctgagtgagtcagctgagggtggcagctcagaagcgaggcagccgtgaggcggaggacaggctgggggatcccaaagggtgcgctccagcccccaacccaggcactgggactctggtggcaccctgggtggcaggcaagccttgaaatcaagtgcacgagccttggaaaggaggaccgggagagttatggcatttatgaatgaagaagagaaagagaatcactcggatgggaaaagttaactggattgttcccacctgcatggatcaccgggtaactgcagtgggaccgagggggcgaggctgcgggctggggatgtgcgggtttccttgtgttgccacgaacccagagagggagaggaagaagatggaaagaaaaaggaaaaagggaaagaaagtaagaggggagagaggggaaaactgaggatgaagagagacagagaagagagacctgagagagggagagaaagaaagagacagaaagagaaatgaaagtgaggaaaggggaaacaggcagagaaagagagagaaaggggaggaaagagaaagggaaaagaaaggagggagtgaaatcaacagaaaaaagagaaccaggaaggaggagggagggggagagagaagagagaagagagagaagagagaacaagagagaagagagaagaagagagaagacagagatgcggtctccctggggaaaggtttggagaactgggccaggcctgtttcccgggactcacgagtgagcagtccacctgcccctctgaagcattttatagactcatttgtcccacttttgtgggctgatcatcccacaggggaacaggggacaccacctcaccttttgatttcttaccagaaacttgggcgaggcttccaggagccacaagagcccttcaatccacccagggacccccgatgtgggcccaccagccatccttagctttcctcctctccagaggcaacagggaataggaaaaagtccagagcaaggccacaccatgatcttaacgcaaatggaaatgtgaggaaaacgatcaatttgcttcctgaaaatgacattttttttttctggtttctatgagactcgaggtggccttgctgaaactgaaatcggtatgagctttccctggcagacaatggccattgtcacatattaaattctcatgaaagggataactttgtgggcaagaggagagttgtgcagggtgattatttatacttgcataattgtgattatttgtggcaattatgggtctttcaatgtacaaaatttacaattatgggtagtttaaaaactacatgctaaggccgggtgccgtggcacacacctgtaatcccagctctttgggagagccagacgggtgggtcacctgaggtcaggagtttaagagcagcctggccaacatggtgaaaccccggctctactaaaaatacaaaaattagctgggcgtggtggcgggcgtcagtaatcctagctactccagaggctgaggcaggagaatcacttgaacctgggaggcggaggttgcagtgagctgagatcatgccattgcactccagcctgtgtgacaagagtgaaactccatctcaaaaaaaaaaaaaaaaaagttaaaactacatgctattctggccataatcatttgagacttcagtctctgggctttccggatgtgggtatttcaaagtcccaggcggctgatgggggttcacgcattagtggcattttgtggggagaatgggtgttacattgatgtcctacatagggtcataattcagtattttcagaacttattgtactgctgttagagatacgaacttttccacaaagtatgatgcttgtgtattaatagttgtactggcttatttataaatgagaggatttgctgataattattgagactgtggcatgggccaggcactagttaggttgagtactttatatgcatgtactttatacctgaacaaattgacaagaagtgggaattacggtcaggccattttacaaactggggcaactgagttcagagagtttgggccactgtcctgaggccaggcagctggaaggtggcagaactcccggatccctgcttccaaccaccgcgctgtgtctccaggacacgtcctgtctcactgggttttctgctcctttccaaatctgaggaccccaaaagaaaaggcctgttttataataacggcttcttttcgaagaggtgtgtgaataatgggggaaacacgactccaaagtactttttctctccagcctgggcaacatggcaaaacaccatctctagaaaaaatacaaaaatcctccaggtgtagtggcacatgcctgtggtcccggctactcgggaggctgacgtgggaggatctcttgagcctgggtggtcgaggctgcagtgagctatgattgtgccactgcactccagcctgggtgacagagcaagaccttgtctcaaaaaaaaaaagtgctttttctacatcctagctaaaccccagctgttgaggctgagagttacaggtgggccctgcgcctgctgcatcctcacccttgtgatggggcgacacttgggagggtgtgggcagctgtaaagggcactggagactgacgggtccagcgttcctcactttccaggtgaggaaacagaagcgcaatgcaggtgagctgaccctgttgagataacacagattttaccccacaaatagaaaaaagcaaagaaaatggacaaatagtgtttgaacaaggctgtcctcaactcacaagcagatcaaacaagagcaaaagaaggaaccgaagctaaaactcatttattgtcttcaaacatatatttatttttaatcaaaaaaagaaaaaagttatgttatccagatcttgcattttgctcagggaagggtgatatacgcttggttcctgacctctttcttaccgagtaatcgcttgagagcttttgaaacggcagcaatcataaggctgttttggggagaagcctcagctctgtgttggccgttaagtcacgtctgtgggcattatcgcatcttggcctccgtagctgggctttcctgggctgttaactgcaggggccctcgctgggtggtcagagctgctgcgggtgaggttttgggaggattcagggggtcttgctgggtgtgagggaagcggccttgagtcagatgtctgtgagtgggacccagccttcttgctccacgtttatctcccacaccaccccttcccccagaatcaaagtccagggggaatcaggaggaaagtattgcagagcagggcctcttttccttccccctcccctccaaatgcctacctcttcatccttgtccctgttaaaaacaccatgggatcataagatcaccccacaaaatcttgctataaaatggtctgtttcctctgcttgttatcaggggtaactgatcaaagaaatggtgcccaggcctggttatctaataaccaaataaacatccaggcagcctcctgggccaagaagggtaggcaggggtagctctggatgaagcaggggacaggccagggtgggctgggcccctcttggtgaccatttctgcctccagagtgagcatgctggctcggcccagagtcgaccagatccttataacaacctgcatgttacagatgaagaaattgaggcagagaaagcaagtctctgtccttcagaaatgcctggtgcacccctgagcctagcacatgccttgtgcatagtgggggctcgctgcacgtttgctgagtgaattaatgagagagcaaatgaactatcacagaatgagcactgggtttatcagaagacctgacttcaaatcataatgctaccacttagccactcaccatggccggtgctagggggaggcgaacttgttcccagggctcaccatgtaataggcactcactcttgggtgggcataggtgcagatagcccctccaggtgaatgccttctcatagtttgagccctgggtgcctcccactagtcccggccctgcaattccctttgcatctgtttcttcctctgtaaaataggatgaagctgtgccaccctgtaggaattagaagaccatgtccaggaattgagcactgggtgcaggatccagtcttctgaggccctgaaaccacatggtgagaagttgaaggtcacacagctggtatgcaatggagcctggatggaaacctggtccgggctggaaagactggctcctcagcttgaacctaaaatacctaggtcttgaatggcatcttgttcacctgcctctgggaaggcaggttgtggaaataccttgggctgtctgggaactcaccctccagcccttaaacctgtataggtattcttgctctatctggctattgtgtgtatggtgggggctgggggatgatggcattggagggcttatcctagcacctggcacataaatgttaagtgaatatattttgaatgaatgtatgaattcggtagatgaatggatgagtgggtgggtgagtgggtgggtggataaatggatgggttggtgggtaggtggatagatgtgtgactgggtgagtggatgggtggatgggctaatgggtggatgggtgggtgggtagatggatggatgaatgggtgaatagatggataggtggatggagagcaagatggatggatggatggatgaatagatgaatgggtggatgggtgggtaggtgggtggatgagtggatgggtggtaagtgggtgaatgggttaatgggtggatgagtggggggatggatggatagatggatgaatgggtgaatgggtgggtggatggatagatggatggatgagtgagtgggtgaatggaagggtagtgtatgggtgggtgggtggatgggtgggtgggtggatgactaacactccagttgccataattgttgctctggggtggtgctcacactgaatggtttgttaatttattagtaacaattcattagtgtgttaactcaagcggtggagacacatcttaatccctgcacttaagaggtgctttcccacaaaggcggggccttgtgttcttcctgtgaacagccatagcaccagcgtgagaggcaggtgctgtcgagcgaagagcaaatgcctgctcttatgtggccagccttctttgcctgggaggtttggggatttgtttttgttaaatttctgggtccccagcccagctcaaacccctcattgatgcctgagccactcatagcaggctatggaatggcagctgagcagctgggtctggcaccaatagcttcatcaacatgacacccagacatccctctggtcgtggagctgaccgtttgatgctatatagacccaccagggcttgcagatggtctgtagaaagaatgggctggcttggttcattttacttgggaggcaagaaaattcagcctgagcaagggcttctgttgatgcaggatggaggagaggctgccccgctcatggcagaaggaaggctttgggcgtctaatggggctcatgtcttggtgacgcccttcatgaggtacatgactttgggcctttgggcacagccttctgagctttgtgttgctcacctgcaaagggagaatcctcaggttttggggagaatgcaatgagatgacacaagtaaagccctcagtgtggggcctggtgggctgtggagcctggtgggctgcaggtccttggtaagagggcagatgtcaccattatttctgaggggactgggtaggtttgtggatgagtggctcacatcacccaagaccccatgttgggctcagcactgcagggtgttggagctgggaggcctctgcagaccaggtccactcattttcaaatggcctcttgggagccacctagagaggagaggacagggaagggaggcagagaggccagtctctgagcctcctcctcccccgtgtcatctcagggtcaccatagtgcgcttcatggggtgggaagtggtggcctctaagtgtctatcaactgtgaagactgcaaagagggatccatggctgttggagcaatgagatacgcgatgacgtagacagatccggaaagcgcatcgtctcctgagcagaagggcactcatgtaagcccagaccacaaacctgcacgcaagtgttgcatgcatttaacttgtgtgtgtctaaggcaatccatcagacatactccaggggatgtctttcaggaggaagaaggaaggaaatgggtgtggagatggaagaggggcaaagggaaaaatttatacaataaaataagacagatgagggtcccaacatagaccaaggttgttagcatgccatggactcagtaatgttacatgcaactttctgtgtctgcggtccgaaaagtatgataagcaaaagagactatagagagactgaggcacagcaaggggcagggggatggccaaaatggtggttgggtgtcacccagacactcaggtccctctggccgtggcactgacagtccggagtgatgtagatccaccagggcttgcagaagagcatggttcggtgcccattctctgatgtctgcttgtgtgtgcagaagagctgcttggagcagggtctcacctttccatacccatcggctccccccgccgccatccaccagctgggtcgcaagaaaaggcaaaagctattgtgacagcttccttgttttgagaggcttttgtcgaaggagggaaaaagaaaagtcaggaaacatgtgtggcttcaaattatgtcagttataaagtttattgttagcccccattataaaaatcaatatatgctcctcatataggattttaaaagcactaagtttattatttctctctcattgtaaaattaacagtggtcctaatatgctatttagaaaatacaaagtggaaagaagaaaaatgaaagtcacgcatcgtccttcaacccggggacaactcctgctaacactcggatggatgaatttcacatatacatataaatattctcatctacagtcaaatttaataatgtgaatgccttaataaaccactaattcttcaatttcatcttttgggttaatttcctagtctttaaggaactgttagatgcaacgctacgggtagtaggggaaggacacgaaaaaagaaatcttattttttggccaaaatatcctgcatattggatttgcctttgttttgttttgttttgctttgagccttctgccttgttaggcagctgtttgtatactttcctctgctttggatttcagtctggaagcagcacattgattttaaacagaaataccttaaaagaggtggtgtttgggggtttacaatccccccaccatcagcttgcaagtggttctgttccggctggcacgttacaccagtaagaggcttggtgtatcacccagggagcaggttagctaaattcaaggtgaacagacggcattctctgtttctcttctggctgtctgcctagtttggggtcttggggaattggagaagcaaaatttgggggctgggatcttggacaagtgctcacaccacaacccaagcctaagaccttatttttcccttccttccctcttctttttttttcagtttacaattaacactcagggtttagtctccacccctccctcttgaaatagaatttttatctcttgattcatgctacaagataaaatccatgtttatccagtttcatgaataattgataagctctttccaacttgtcagaagcaacttagccgtctcgccttgcggcctggaacccctggcaatttccggagcaccggcaagagacttttgcacagtttctgcttggagtctaccgactgtctgtctcagaggtgggggtttatctcttgatcctgattcgtgagttacagattaggcactgaagattccagcaccggggatgcgtagggccgggggagggagggaggtgcacgtcagagtccacttagattttctgaactcatgtctgtgacaggtgcagacctggattccactgggagcacccccacccccaccccccacccagggctagcagtttcagagttcacagcattaattaactctaatctgttccctgatagtttaaagcaggctcaacatgtgaaagcattttccttcctgcttatttaatggacttaatgagataacaatgagaatctgtgtttaggctctgtagcgcatttggctctcccgccatgtttgtatgataaaaggcagtgggctgttgtttatgcgcttagctggggtttattctttttaaacaggtctggacagctgcttgttacatttggctcacgctagcttaaaaaaggaatttatggaccttactgcagaacgtcccaattcttcaggccaaggtaaatgcaagttggggtggtagtgaagttgcaaactgcccctaagaaaaaaggttaacaagatattgttccttccacccccggcctcccgttggttcccccaccccaagagccttcccaccaggcttcagggtgacaaacgcttggatttgatggggctgagacttgcttgtgcctttgttgatggcagggcacttttattgaaacttgttgaaaggagctagcttcgaaggctcctccaagattctacaccacagggggaagcaggactttgatttaagatactcacatctgtcaaccacaggcattcattcagttttctctttcatttggggaaggaagggagaaaatgaatcagaggctgatttttttttttctggcctgttttccccaagctccaggaaattaagaaacatgccattagttttagcaaacaatttgaacaaagtaaaaccagatctcccaccaaaggccgaggaccatgaggggtctgagtgcccctggccctgtttgtggactctgcgggtcgtggaggagccatgaagtgggaagagagcttgggtgatacaggatggtgtgcgtgacagtcctccctgtgtcttctttgctaccatatttatcatagcttagatgtgtgtggcctggtggcaccaaaggtgaacagaaagcatttttggggcgccatggcccagacctcagcctgaacgttgtgggaagccagtgggtgtctgcatgtgttggcgagaaccagtgggcatctccttggaagccagtccccaaggtggctctagatggcttactcctgcatcttgccaaatccacagggtccagctgtgtctccagggctgcgtggcttattgaaaaagagagtgtatggtggatttcaatatctatattctacaaaaaatgtaaaaggggcaggggacgggaacaaagaaaccagtgctggtgatcctgcccccacagtaaggtctgctttagtgtggacatgggacaggggccagcccctgctgctccctgggggaacacaggtccgtgggggtggctcaccgtcatgtatgtgattttgatgtttgtacatttgttgtaccacatgaaccagtcttggacggctgttctgagtaaatgggatgatgtgggtaaagcccccaagaccagagcctggcacagggccgtgctggataatgctgactcatggtgatgaggggaaggaggaggcaggatgccatgggtgaggagtccaggctccagtgctgctgaaccaccatccaccagtatgatctcagcaagcctctctccacctggacccagatgattcacccgttaaacatcccaggcacattgaagggagatgaacagcgtccagcatggtcctcagctgtgagaagccatacactcgccttttccaccctacaactttccgtcatctggggtgcaggtttctttcctctctttttacttattacaaggtaaaatacagtcttattacagaaaactagaaaccagaaaagcccatcacacagtcattcattcaacaaatgcgtattgggaagggtggggatgagcccctggtggaaatggggtgaagctgtggactttctctgggtgcgatgaaggctgacggagggctttgagcatcctcaagattcagaagtctgttctcagtcatcagcagctgtaccaggagaggaagaacctctgaagtgttctggctccaaaagctagtgaaagtgcagatttcctgagaaggagtgaagcttagggccctgccaggcagtgatgctttctcaactttgggggcagtaaaatgtacagactctggggaaggagaccaggaaggaggctgcaaagtgtgcatgctctgggaagggggcagggaaggctggcaaaaagctgttggggacccagccaggctgcttcccttggaggcccagcctgagatgtgtttcccaccatatatggcagaaatgatttcaggtgctatgtagataagccacgaactatcattgaatcttttcttggttgtattgtgaaagaaaaagtctctgttgggtgctggtgtatcttcgacaccacttaacacttgtcaagctctcctttactgaggtaaagcagtcctcaggctcagagcttgtgaccagggagcggtatctagccaaaattttatttcaatgctttgttttcattgtctttaaaacaaaagatggttatcttccatttgccatgaaagatactgcttcccatttctgttttttactcatttttcattaaggtataatttgcatgcagtaaagtctcgtctttttagtgtacagttctgtggaatttcgataaatgtatccagtgtgcaaccatcacatcaagatatagaagggttccttcacccctaaatccttccttggggatgacaacctctcttcaccctcagtcctttgcaactaataatctgttttcttttcctatagttttgtcttttctagcatgtcccataaatggaatcttatagcacgtagccttttgagtcttgcttctctcacttagcagaatgcatctgatatccattcacattgtgcctgtatcagtagttcattcatttttaataatgagtggtgttcagttgtaggcctacactataatttgtagagggacattaggattgtttccagatttggcagttacaaataaagcccctataaacattcacgtacaagtttttcatgagcatgggttttcatttctcttgggtaagtaccgataagtaggattgctatgttgtctaatacatgcatgtttaactttgtaagaaatggccaagctgtttttcagagtggctatactattttgcattcctaccagcaatgtacgagagttccagttgctccatatcctcatcagcacttgatgttgtcagatttttttttttgtttttgttagtctaatgggtatgtactagtatctcactgtggttttagtttgtattttcctgatgactaatgatgtttaacacctttttatgggcttatttaaaatcactatattttctttggtgaagatttcaaaccttttgcccattttaaaattcgaattgtttgtgttttattattgaacttattgagtatttacatattctggatacaagttcttttctagatatgttattagcaaattattctgctagctttcttattaattttcttaatgatgtctcttggagattgtattaattagtctgttctcatgctgctaataaagacatacctgagactgagtaatttataaaggaaagaggtttaattgactcacagttcagcaaggctgggggagcctcaggaaatgtacaatcatggaggaaggggaagcaaatatgtctttcttcacatggcagcaggaaggagaaatgccaagcaaaagggggaaaagccccttataaaaccatcagatctcgtgagaactcactcactatcacaagagcagcagcatggaggtaactgcccccatgattcaattacctcccaccagatccctcccatgacatgtggagattttgggaactacaattcaagatgagagctgggtgggaacacagccaaaccatatcagagatcataggttgttaattttgatcaagtataatttatcaattttttcttttgtggattatatttttggggccatatctgagaaatatttacttaatctagggtcacaaagattatcttctatgttttctcctgaaggttttatagtttaaagttttacattgaagtctattatctattttgagtgaatattttgatatagtgtgatatatgaatggaggttcattttaaaaataaatatccaattattccaaccccattggttgagaagactactttttctctacttaattgcctttgcaactgtgtcctaaatcaactgacccactctgtataggcctatatctggactttatagtctattgcgttggtctatatgtctgccctttctctaattccacattctcttgaatatcttacctttgtactaaatcaggtagggtgactttatttaaaatatattcttctggccagctgtggtgggtcacatctgtaatcccagcactctgggaggccaaggtgggagaattggttgaggccaggacttcacaaacagcctgggcatcatagggagacccccatctctacaaaaaataatttttaaaaaattaactgagcgtggtgacacaggcctgtagtcccacctacttaaagggctgaggtgggaggattgtttgagccaggagttcggggctgcagtgagctatgattgtgctactggattccagcctgggcaacagagcaagaccttgtctccaaaaaatattttatatacatacatacatatatatatatatatatatatatatatatatacatacatatatatatatatacatatatatacatatatgtgtatatatatatctgtatatatatataactgtatatatataactgtatatatatatatagttctattctaactttattcttctttttcaagatcacttttgttattttttctttatcttttcataaaaattttagaatctgcttgttgatttctacaaaaaactctgcattatttttaagtcttgctttgctgcccaggctggagtgcagtggcatgatcatggcttacagcagctttgacctcctgggctcaagggatcctgctgcctcagcctcccaaagtgctggggttacatatgtgagccaccacatccagcctcccatgggttttgattagaattatgctgactgtgtaaatcagtttggaagaattgacatcttcacaatattgtctttgtcaacatggcatgtctttccatttatttaggtctttgatttcctttatcattgtctttttggttttcagcatatagagcttgcatgtctcttataagatccatacctaagtattttataggtttcggtgctattgtaagtggtatcttaaaaaatttcaattttcattgccaagtatacagaaatacaattaatttttgaatatggatcttattaacgtgacctggccgaactcactttttagttttagtagctttttaatagactgtttgaaatttatatgtagattatcatgtcatctagcaatagagtttgaataatttctattgacctatcctcaggttagttgattcttttcttacctgtgttgagtttactaatgagtctatcaaaattattctttatctgtgtgagtgttgtttttacttccagcatttccaattgatttttttcttatagtttcactcctctgctgaaattatgcatgtgataattcatgatgttctcatttccagtagagtctgtaacatattattcatagttattttaaatttctatccattgtgtttctacctttccaatgtggatgtctttttttcccttgccttattgtactgatacagtattagacaggaggaatgagagctggtatcatcccttgttctcaatcttaggggaaaagcattgtctttcactgttatgtatgacattagagttgtaagttttcttgtaatgtcctttatcaggttgagattgttcccctctagtctttgtttcctgagagtttttttaatcatgaatatgtgtttataaaatgctttttctgtatctcttctgatgattatttgatttttattcttcagtttgatgatattacattgaatattgatattacagtgagttacattgattgagttttttgaatgtcagactatccttgcattccttaaataaaccccagttggctgtagtgtactatcctttttatatatgttttttttttgcttgcattttgttaaggatattatttatattcatgaggattattggtctgtagttttcttttattataatgtatttgtctggtttagatatcagggttatactgatcccataaaatgagttggaacacgcaccctcctttttttgtatactgggagaaattgtgtaaaattggtattatttctttcttaaatattcagtagaaataaccagtggagccatttgggcctggagtttttttttttttttttcttccttcttcttccttccttccttccttttttttcacaagtgctgactgctagtgagagatttctttttagaaagttttggccaggtggctcacacctgtaattccagcactttgggagaccgaggtgggtggatcacctgaggacaggagttcgagaccagcctggtcaacatggtgaaaccccatctctactaaaaatacaaaaattagctgggcgtggtggcaggcgactgtaattccagctactcgggaggctgaggcaggagaattgcttgaacccgggaggttgcagtgaactgagatcatgccattgcactacagcctgggtcacagaatgagactccatctcaaaaaaaaaaagttttaattatgcatttaaatttccttaatagatataggattatctattctttgtaaggtgattttcaatgttcaatcttccattcctgatattgatcatttgtgttgtccttttccactggtcagtcttgacagaggtttatctgttttattattttttttcaaagcagcagctatgggcttcattattttcttttctcaatttcattaatgtctactcttatcttcattatttcctttcttttgtttatgattgtttcatcttcactaatggcttattattatttatgtctctttaaaaatttttagttgttgacccaagttttataacatgaatctttaattaaaaattctaacctcaaataatatgatactactttatatctagtctaagaaacttacaaaatatgctaattattcttttctccaacacttttgtgtcattggtgtcatatattaatattttatttttatgtatgctatgagtacacaacagcttgttactacttttgtttttgctactacttttttgaaagtcagttatcttttagattaggaattgacaaattttttctgtaaagggtcaaatagtaaatgttttaggtcttgtaggccacaaattctggacccgtcatagtgtaaaagcagccatagacaatacatacataaacttgtgtggctttggtccagtaaaaacctttatttacaaaaacaggcggtgggctagatttggcccacaggctgggatacattttgggttgatagtttttgttgttgttgttttagcacttgtattgtcttgtggcttgcctgacatctcaggggaagtctgatgtaattcttatctttgttcctctgcatgtattatttttctctgtctacctttatgattttctctttatctttagtgttcagcagtttgaataagctatttctaggtgtttgtttttgtttaatttatcctggttggtgtactctcaactttttggatctgtggttttgtgtctgtcattagttttgaaaaatgctttttgtataatttcaactattttaatgtattaatgtacatcttttgtattttaatgtattaatattggtttcatggcccataaaatggtttgctttggttaatgtttcttgtgtacttgggtggagtgttctataaatgtcaattagataattatttcttcaaatatttttttctgcctcattctgtcttctcattctgtaattccagttactgttctgctagaccatttgttattgtctcacaattcttggatactctgcttatttttaaagctccttttcctctttgagcttgaataatttctagtgacctatcttaagttagttgattcttttcttacctgtgttaaatttactgatgagtctgtcaaaatcattatctttatgagcatgatttttatttcaagaatttccatttgatttttttcttatcattttactcctctgctgaacttacccatttgataattcatggtgttctcatttccactacagtctataacattttattcagttatttaaaattcctatctaataattccatcatctgtatcatagctgtgtctaattctgttgattcttttgtctcttgacagtgtggttttttttcccctcacttctttgaatgcctcacatttttttattgaaagccagacatcttatgtaggacaatagatactgaggttttgacatctgggaatggagcatgtctttatttctgctaggacttcagtatgggcagttgagttggtctatttaggaattcagatgtgttagatttcattgttggctatagttgctcccagtgtgctgccagcttcaaagtccttttatgttagtttgagtttaagttgggcgctggtttgccagaggatttttttcaacctctgctccaccctcagcttttagtcttcctttgtgctttgccacagattgagtctctctcctgtctcttgtccctctcccgggaagagaccactgttacctgctactctatatctgtttgcctggtagtaggggttggggaatattctctgttgtgcttattttgtctcagtcttagccaggcacttcatggttctgtttagctcccagctattggtctgggcttaggatgcattcctgcccgccctactatacaccaggaatagtgtgagggtggtttgctgctgttgtagtttccttcagtcagtttcaataattttcattagtgccctcatggcagtaggtttcattgcccttcccctagacattttagggagatccaggtgaggatctgtgctttttctgcagtggtttctgtcctccttccccagtcctatgctgcaagggatgctttctcagtattctcatcttgccctttcctatcttttttgtgggcactcagttcagctatggaaacaagcctgcatatagagtgaattcatcttatgtctgtggctctcagaagtgccatatagtctcagcagcccacgctcagcctttagcaatttgttaaatattctagctattttttttcctgccagcatctgatggcacctactccaggtaagcaagtattccaggactggaatactctccttagaggtacctatctttccttacatttcaggttagctggttgccttgtaactcagatctctgctggattaaagaaaagttgcaaattttcaaattatctggcttggttttctattggagtaggagggtctttccagcattctacatctgaagcagttcaacttcttttaaaaataaactttctccactaaaaataatgtgtcctttaatatattaatgatatgaagcaaagcaaatactatgaagcaaggttaatcgtacaaagcacctacaacagggctttggagtcagcattctgtctcatattttctgtgtgactttggagaaggtatggaccttgagcatcagtttctgtttccttgtctgtacaatggagattgaatattatccaaagaattaaaagagctagtatataaaaagtgcttggctgatgttaagtgctccactaaattgataaaattaacaaatgttattactttacatggatttaaagaccatctctgcagtgtggaagacagtcccagatgcagttgggaaatgaggtgattcttctctgtgtgattcccaaatctcctggactctggctggcataagtgtgtgtgtgtgtgtttatgagaatgttcactcgtagaattctctaaagtagcttctgccactactaccaccattcaaagcatactctaaggcaaaagaaggaaatatttaaagagtgtgagagacagtgaaaatatccagcccaagaccaggcatggagaaagcccccaggaaacatcagcaaagtgaggagggaatgtacagatgggagaagtatgtatggcttggaatagacgcccccccagcttagtccctgcatgtgaaccaatggctgtgtgtctgggtgaccttgggctggacccttgacacccctgagcctcaatttctcattagcaagatggcagaaatctctgctgccctccctcacctcctatgattgttgtgaagccgaaacaagaccatgtctgtgaccatttggaaactctacaaacatatcaggcattagtgttaaaaatgatcactcaaacccattctgaaaggttgaaggatatgtgaaaagtggaccttgaggccttctcaattatggcttcagaaatagttaaggtaaagtcaggcggcaagtgatcaatgcctctcgatgtttctttcccaaggaggcactcagatttttgcagctgcctgacatgtttcttaacaacttacctccaactggagaaacatcagtagttgtcgaggccacagtttgtctggctgatttatacaaatcggtgaaacaatatctccagcctattctttgatcttggtttgaagcaagtcaacttaaacactcatgggagctggaaggagatccttcatacaaatgtgcccacaaatctttcttggatgctcagggtgaggcctctgctagttgcttcaaaggcctcatccatcatgacagggggaataaaaactcaagttatgctttattaaccttattgattgccatccttgacccaactcaacccatatccaactgtggcaggaatttctaactcaacttttgctgtagtagaactgcacttcctccaccacaatcctctctgcaccctccctccctggccctggcacctctctttaatcaagaagggcagcagggaaggaagatctcactgctggagaccaagtgctgtgggtcattaagggggccagttctggagcttgaatgcctgggtttgaatccaagctctggcatatactgaccttgggcgagttctagaaatctgcccctgcctcagagtctccatttataaatttatatggttcattggtaggggttataccagataaacagaatcaggaatttaaatatgtatattttaaggaattggctgtgggactgtggagtccggcctagtaaggctgaaatctgcagggcaggctgacagactagaggcctgcaggcaggagctgatgctgtggactagaccgggggcaaaattttattttcctcagtgaacctcagttttgctattgaggtctttctactgattggatgagatccccagattattaaggacaatccttacttaaagtccccgactgcagacattaacccatgataactataataccgtcacagcagcacctgcattagtgctttgtggaataactaggtgctagagcctagccaagttgacacattaaactgaccagcacagatggtgtagaagtgatgtgaagagtatgaggtactacatgtaatgtttgcaggctgggacccagaacacagtgtggactcaataaatatgagctgttcttattgctgcgaggatgcagagaggagactcacaaatggccccgtgtatagtaagtgctcggtaaacattagcgattattatgtcttcaaaatttcactcaatatgcatcattaatgtcagggctgtgatggtggtgggggcactgactggggcctatggtagcaagtcatctcatgcacactcacacacacactctgtctcacacacacttgcatactcacacccgtacgcatacacacgctcatacaatcatacacacacacacacatggttgatgacaagtggtgacttcacagggtgaggacttatgaaggatctagagtctgagggcttggggagtggaggtttgcaggatgagcgagtttcctggggaaggggtggtggctggaggggcggggctgtggaagcccaccgcagctaggacaggcgcaagcgtcggcccccgggcagggtcctagtgtggtggggtgggtcccagccaaaccctgcatatcaggtcctgactatggatacttgattgctttgatttgatttgatttattttatttttttgagatggagtctcactctgtcacccaggctggagtacgatggcatgatctcggctcactgcaacctccgcctcccgggttcaagcgattctcctgcctcagcctcctggaattgcaggcacccaccaccatgcctggctaatttttgtatttttagtagagatggggtttcaccatgttggccaggctggtctcgaactcctgacttcaggtgatctgccctcctcgaccttccaaagtgctgggattacaggtataagccaccatgcctggccctgctttgattttatattggcattttttttctcttttcgtctgaaaataatttaaaaaattgcttattggccatatccatctatcaatctatttaaaaaataacataccaacattattgctaacaatatgattattcctaaaaacagctccagatttctttgcggttcttgtctcactaggggtgtgcatccctatctgtgtattttaaaatcatctgaaatgattcttctctgattggggaaaccaggaggtggctaatctttacttaaaggccagatcacctaggtaaaaaatgagatatcctcttgaaagcaacaaggacaaagttgttcagcatgcgtaaacctgagtgtcatgattggtttgtctggtctggtcaggatacacatgcactccgcatcccccttgccatctcaggtccaggccaacattgtctctcacctgacaactgtcacagcttccaaaatggtctccctgctcccactctaccctgtcctcatccttttgtacttggcagccagagtgatttcttttccaaattgaactgtaatatcacactgaaaaggggttcaaagaattgtcacaaagtcacggacagaatgggaggccattacctaagtgaaatgagtcagaagcagaaagtcaagtcactgcatgttctcacctataagtgggggctaaacagtgggtacacatgggcatacagaggagggtaatagacactatagactccagcaggtgggagggtgggtgtattagtctgttctcactctgctaataaagaagtaccagagactgagtaatttataaagaaaaagaggcttaatgggcttacagttccacatggctggagaggcctcacaatcatggcagaaggcaaaggaggagcaaagggaggtcttacatggcagcaggcaagagggcatgtgcaggggaactgccctttatagagccttcagattgagtgagacttattcactgtcacaagaaggggaaaaatccaccaccatgattcaatcacctcccaccgggttcctcccatgacacatgcggattatgtgggctacaattcaagatgagatttgggtggggacacagccaaaccatatcagtgggagagggttgagtgttgacaagttacctgtggggtacaaagtgcactcttcggatgatttgggtacactgaaagcccagacttcactgccatgcagtatatggaggtaatgactgcagttgtatcccctaaagctataacaatttttaaaataaaatggtcatatagcacacttctatggaacctcaacccagatcaagaagttgcttccttgtcccatctcagaaactgtgtccccctcacccccagcaagagaaccactgttttgacatctcacattattatttcattttacctgcatttgaattgtctttcaatggagtaactcagattatattctgttgcgtcttgctccttttgcataactttttaaagtgagacacaaccatgtagttgtgtgtgggtatagctctgttgttatttttgttgtacaatattctatttatgaatatgctataatttatttatctattttgctgttgatggatatttgagttgtttcctttttgggggctactacaaacagcacatgtatgaacattcctgtccacgtatacaccgctgttggacagaagcagattttctgtgttatggagtatacataggttcagtttctatagataccaccagttttccaaagcagtggtcctagtccacattcccagctgcagtgtatgagaattctagctgttctatacccttggattatgtgccattgtctgggggtcttctgtttgttttatttttgtttctttagtttttccattctctgagtgtgtagagtattttactgtgcttttaatttgcatttatctgatggctaattaggttgagcctcttttcatgtgcttattgattatttggacatctttttatgaagtgtgcctgttcaagtcttttgcccatttttatataggtgtgtttgtattctctctggacttgtaataccttacaggtctggatatgactcctctgtcatttgtatgtgatttagttatgaaagagaatctgttcaggaatctgatcttgtcactctcctggcatccccgtcttcataggtcagcatctttgagaggttctggtactcaggcctttgagttctctggcctgtctttgggccaccccattctgtggcttctccttcagctatactagagcctctagagtgtccttctccttgtcctggaatctgacacagggcagtgtgactcagagctaagggcacagactctggagccacactgcccggtctcaccgctcaagtgtcgaatggtgctgacaataataataatcccccctcaagagttgtgaggagttaatgtgaagtccttagaagagtgctgagcacatggcaaggcggggtgagcgtgaatatttttttatcatcgtttatgttcactgaggttctgcttttggaaatgtcctttcctttcatcacctatgattctaatcacccttggctaattcctacctaccctctaagtctcagctccaaaatcatgtcttcagggaagccctctgtatcagtcagcacaagcttagttgacttgcagtaatgaacaacctcaaacttgcagtggctttaaaccatcagaacatattttctgccacatgttccctgttgggtggctaggggatctgccaccatgatacttttgaatctttgctccagaaccttgtccatggaccagccactacctggactgtcaataggcagtggtagagggaaaaaaggctctggtaggtttcacacaggggattaaggctcaccaggaatgactcttatgtgtctcccactctcgccagaactagtcacaggccacattgaccacaggggccaggaagttcagtcgcatcttgtactcagaaggagagagaactgagatatttggagggttgcaccaatgactaatgacaatttgcctgaaccccaaactgagttaggccatgctattgtgtgctttgtctatttcacctttctaacacacaccattgtgcagtcatgtgtttgtgtgactatttgattatcgtctatgtctcccaccaggctgaatttcacaagggcagggccctattggaactgttgactgctctatccctgtttctgtcacttgccccttgcagacatttgagaagtttggtgtctatagcagtcaatcattggaaaatagatgctggtctctttatcctgccatctctagataccttttcttcttttaattattcaccgcagaaatttatatacccatctcccagcttccacagttatcaacatgccaatcttgtttcatcaaattcccatatttcattgcagaaatttttgagtctataaaaaatagaatcatatagtaaactctcatgtaaccatctcccagcttaaaccgttatcaacatgccaatcttgtttcactgaattcccatattctctccccacctctattttaaagtgaacacatcctatcatttcattcacaagtcattcactacaatgtaataccattactgtgcctcaaaaatggacagtcattttaaaatatcatataatacccagtcaatgttgcaattccattgatggcctcataaatgctttgtttaaattaagatccaaagaagatccacacattgcatttggttgatttggttttggaaatctttagtgaatctccattcccttttttattttcttatttttctattggaaaccatatcacccatcctgtagcctttgccataatcttgattttgctgatgggatggtgtcttctgatatgttcctctgtcccctgtgtgtcctgcaaacctgtagctagctctcagtaagatctagaagtttgatgatgttcatatttgacttttttggcaagaattcatcagagttgtcattgtatacttgtactgcctcattccacgtgatgtctgtttgtctgttaagcttcctcagaggttttggggtttgccagcctgatccaccatggtacccaccttcatccacggtacccacccccatcccccaattcccagtgatcccactcctgtttactttgttccactttcttacaagaaaaatcacatcctaaaatgttccctccttgcacggaaaacccatccagacgaggctcaagtcataaaagagcatgagacatggatctccatttgttatgaagttagtgggcatcagctttatcaacagcccccatctttaatcaagaagaaattacccactggtgggacattatggttttcttttacaactagctcgttttttaaaaaattaatttcagttcaattttttttttaattttacatttcgggatccatgtgcaggatgtgcaggtttgttacatgggtaaacgtgtgccatggtggtttgctgcccccatcagcccatcacctaggtattaaaccccacatgcattagctatttatcatgatgctttcccccactatccccctacacaggccccagtgtgtgttgttcccctccctgtgtccatgtgttctcattgttcagctcccacttacaagtgagaacatccggcatttggttttctgttcctgtgttcgtttgctgaggttaatggctcagttcaacttttaagcaaggaaagagaaggataattgtgcagcgtttcctgaaaagttatgaaagaaagcaaagggtcatttttcagaactcctctcccaccattaagaatcatccatcgtggctcttccttgcatcttgcagccgagctgtaagccctggaattggctgatggggctttgcttccagagatgtttctcagatcctcctatttacaaggagggtgtttggaactagaaaaaagctggaggttcgcatcaggggaaattctcagtgcagctcacacactctcatgcctgctgggaatccgggccctccccactcccaccttctcctctgcagccctctcctctcttctccatccttatttccattcgaatcagtggttatggggtgctgtcaggcctgagcaccgatgaagggatttttcaagctgtaatttgtcatgtggatgaaggtttgatcccttgtttggtgcccgcaacattggggtcctaatttccactccagggccagttctctgtggagcagggcaaagcttgcctaacctttctatgttagtttcatctcctggaaaatagagttaatatctaccctgctcctaggaacacgggaattagttattgttttttcagagtgctaatctcatacctttgccaacacaaggcaattccaccaacagcccccaaattatatctgatcacacagtggctgaatgtgttgatcatcactacttccattgtgaaactccaaacgaatatttttaaggttgccactttattcataaatccaagaagttatcacagccactgcagtgagtgaggttcagagctgagggccacttggaaaaaatcaccacccactccagccccggcctccatccaaggctaggcaggctatcacgaagcaaacgagaaggtcacgacaggctgcagcttcgtccctttccatttcgggctatgattaatcttttctgatgttcttttatttgaaaaaataatctaaactggccccagacagaaccaactctccttaaaagggaaatctacatgaaaggacggaatgttgctcacagagagaaaagacagggaacccatcgctggaggtttgaggctcctgaggagagcactaaggtgcctcgtctttaacttatgggcataacgggagagctctttcttcttgaagttggtgattcacaacctcatttgaggtctgattccatcaaaaatacatccagctccaagggctgccaaaaaaaaggaggttttctctaacccaagagaccccacacagtttctcctccagcctggagacctgggtgtactgtcagggcccccaccttcagttctcctgccctcctgagttgtaagcagtccccaggaaagactcttcaagaggcaggccgcttgggtctggatggttctctaagtcagagtttctcaactgatgtgcgactgacatttggggctgagtcactggggtggtggggacagatctttggggctgagtcactggggtggtggggacagatctttggggctgagtcactggggtggtggggacggatctttggggctgagtcactggggtggtggggacggatctttggggctgagtcactggggtggtggggacggatctttggggctgagtcactggggtggtggggacggatctttggggctgagtcactggggtggtggggacggatctttggggctgagtcactggggtggtggggactgacctgtgtatcacgggaggtttagtagccttcctgctcccacccactggattctgtgagcagccccttctcccattgcaacaaccaaaaatgtcttcagacattgccaaatgcttctgggtgagagggcgcaaaatcaccctggtggcaattcatggagctgttggtcccacagccctttccagggtgccttcatgtccacagggaaccttcaaagtgccagggtctttggctgagtgggtgagaccttgggaaggcagagcatggagctgtcctgacacgggagcatttttttcccttgtgcacacatccgcctggcaaccgtgctacgagtcactgtggcctgcctcccaggtgcccctttgaattgtgcccacaaaccaggtggttaatcagctctccagcgctgcttggaagcgtccctgcctaagcgagcatgtaattaccagctcgcaccctcagccgtggacacgcaggagagcagcggcagaaacgggtggctcattgcaggagggggagcgggggactctggcctttgaagcgtgacatgaatgccaaagatgatggtgtccgtcccctttggagactggacatgttttgctggcctttactggaacacagccaccggatccctgcagatggctagggcttcctgagctacctgtttgagggagcgggcccccagccccggggggcacctgaagagcggcctaagcctgcacacaccttggcctcttgttaggtccaggggggtgttttatttggcagccttgttccccatcgtatcaaacgaattaaaatacgcccacactaactatagtttgtttgcagtaaaaatatttgaaaggagtttaatgattttgcttcttaaattatctagcagcaggtaattcatcaaagttgcaattacctgtgatttgccccacaaccaataggcatccttaggcattcttgcaatggttttctcaaacgtaatgcagtttttatgacgacgacatcatcaatacagcacccagcaagcagtgaggaggctgcactgctatagttggcaggcgtttaatgaagcatttattaattttgattttgtggctttcttgttgaattttggagcccataattttcttccacattgcacacacttgcgtggaccccagaaaggttcatgcctaaggctcttgggggtttgtgggtgggtgggggtgctcttttttcttggcagtatgctgaaggtgagaagattccagaggtagctgaacagttgctttgctggggagggtttgcttagctgctggagtcactcccagtttcctctttcttggtttttgtggtggtaaaaattaagtccaagcatctggagagccacatgtgtgatttgcaaacatcaaacacagcattcattccttatttcttgattaatttattggctgtcggctttctgatcagtctaccagctgggcattttacttttctcttactgcgaacgaggcgtaattgctgggacgcaaaccggtcggaaaaacaatgagaaattaggcataattgggcggcatttcctgacgaactataatgccaagctcaacatgggagccagtgttttattttcttttttacaaaaagggacttcacagttattcctagcgcgtgagttttcctccccactgctttccaatgcctgggactgagcggagggggtgatttccttcttcccaatcagaggtagcgaatctctcagagcttatggtaatatttaaagacataaaaaggacaggacaattagaaatgtgcacaggtagctttagggctgacgttattgatgcctttgtgatcaatagcactatttttatttggattgctagccataggaagctacggccacaaaatttagagagccctgcagagggcctgtaaaaccctgttgtaactctcatgtcaggccgggaataacggctgatttaaaggctttggctggtgcagtgaggcggggtttccatcagtgtatgcccaggagaggggattacatctgcctggcgtccagaccccaggtggagtgaagccgtttataacacaatttggctgcagttgaattttaatcttgggatccaccgattgctttaagggcgagctcgagaagccgccatttgtttttgatagctttacccagagactaaagaaatccctccccccacagttgttctgttaggggttgtgtctgtggaagggaattgaaagagaagatttggtaaataggagccatggactgtcgtgctttctggatgaactgtgtggacactggctttctgataatcatcgtagctaatattcactgggtgctaatgagacgtgaggatgctgctaagcacatttcacatcatgtttatcttcttaattgtttattttattttattattttttttgagacagactctcactctgttgcccaggctggagtgcggtggtgcaatcaccactcactgcagcctctgcctttgaaagggctcaagcaatcttcccacctcagcctcccgggtagctgggaccacaggcacatgccaccacgcctggctaaattcttttgtattttttgtagttttgtagagatgtggtctccccatgttgcccaggctggtcttgaactcctaggctcaagcaagccacccaccttggccttccaaagtgctgggattataggcctgagctaccatgcccagccacatcatgtttatttaaaaacaaacaaacaaacaaaaacaaaacccaactcacaacaacctgtgagagactatctcaggcccatcttctggacccgcactggccaatatggtcaccattcgttactgcgtttgaaatgtggccagtccatacagagacaagttgtaaatgtcaaacattcaccagatttcagacttgaggtgaaaaaaaaaagtgttaagtactcaataacttttatattgattacatgctgggatttgggtgatataaaatgtataacgaaaattgtattcttttgattgtgtacccatttgtttttactttttgaaaatgtggctaggaaataaaaaattatggatgtgattcacatcatacttctaaggcactgatcttagaagaagaaaagacacacagacctgtaatcccagcactctgggaggccaaagtgggcggatcacctgaggtcaggagtttgagaccagcctggacaacatgatgaaaccccatctctactaaaaaggcaaaaattagcgggcgtggtggcatgctacttaggaggctgagtcaggagaattgcttgaacctgggaggcggaggttgcagtgagccaagatcacgtcactgcactccagcgtgggtgacagagtgagactcagttaaaaaaaaaaaaaaagaaagaaagaaagaaagaaaaagaggcccagagactaaaggatcatgcccaaggccgcccagcatgcaagtgtccgggccttttagatgctaacaacatgaccccagaatgggcacttgtgcatgagtcagtttctcagtcagctttttgtcgtcagccccacatcctgcagaccttggctgaatttgtagcccctccggtctcagttttcccagctcggtcatcagaggctggagttgaatgatctttgtggcttttttgcggacaatggcgttctcaattttgtactctttggcacagagtggtgtaatgtggagaggggagcatcagtctctctcttaatgcttatttaattatatttaattaggaatctcgttgcaattggtctcctggggccatctgctgtggagatttttgaagaatccaaattttatttcttgccatcgatccatgtggttaatgggcctgaggaggaatgatgtcatctgtccttctaacttagcacaagaggcaggaggagaaattgagcaaaatcaggctgagcgcccgagaaggccaccctttggagagccagggcgggcctggctcattccttcaggttctcaactgtagtgcccacggtgtgccccagcttgctctgccctgtgccaggattttggggacagctgggttctggcatcatctgtgcccttgttaacatggtaccctaaaattgatgcttgccctgatggtaaaatggtggtctgcatgtgatcggcaccaatctgtgacgtccagggttcttgagtcagccacgtattccctgggttgccttcaagatgacctgagtggactcactgcctattcttttccctctaggtggaataggattcttacaggagtagggtgataagagaagggggctctccttcattgctgccatcgggctccttggtggaaaactggggcaggattcaaagcaaggctgacatgacctgtacttccccagaaaggagccgctggaggcctggctagggccagctctccagccccggcagctgccccccacccacccccaccgggcatttaatcagtgtaactgattagttgaaacacaccacaggctgggagcctgcgaccctggctgacgtccggggctgttgtttatggctgggtgatttgaggcaagcctcccgaccccgctgagcctcggatccctcagttacaaaatgagacttatcatatctgcccccctccctccccaagttgttgagaggctccaacaatgtagagaggctgatatgaaatgtgggtaaacaggagagtggtatttaaatgtacgctcttaccataattgccttgtattgtgtgtgtatcttatctccccaattagatgcgagatccttggtgacagccaccatgtctccccccttttgatattccccacgcagccgggatgatgctgaacatatggctgctgctcaataaatatgttctgaattgtactgaatttcattttggttccaaatcaccctaaaaacttgatcaggtgcagcccaaaggagcaggctggatgacggaggctccccagcctggctctgtggccgttatgggaaaatatctgtggaatgaatgaatagatgaatgaatgaatgaatgcctcgtggtgtttgctttactcttcctgctcccagctttgacactggctgtgaaatctgcctcctgtgctcaaaatgacttctccctctcctccttcgggatacgctttctgcatcctgcctcgctgtagctcagatttctattaagtagtcaaacataatataaaattgccaacaaaaagatcattcctggattaatctccccctttacatagggaaagacataaaagagagcataagataagaaaaggaaatgaaattaatcttatactttctatggctgcctgttaatttcaagctttcctgcatccaggtgcctgtgttcctgctcggtttctggattgcttggtacttaaatgaaacatcttattaatcatttcccgggaatgctgtgcaggcaaaaggaaaacaaaggcattcaggagccacagtaagtttatttttatagtaatgcataccttatcatcaagcatggccaagacatcaaaatgctaagccacatttgtatacgatctcacactgctattgataaatcacgttaacagtaagctgctggatcaattctgccctgacaccaacctctccacgaaatagagattcgagaataaatgtgaaggtaaccagggaataaaactgtttgagaagtttcacaaaagaagctgaactctgctaatcagaaagtagatccatctttaattccgaaatgaccgcacagcaattcagcagtccagaggacaggcagagtttctcagccccggggtggaatggatggcttcctatctctgtcctgccaaggctgcgttctcacatcttccaaaatgtccattaaccccagctggcccctcaccccaccaagatgatgtaaatataatgattaaccaatccacactagcattaagatttcttgaaactcctcttcactgaaaaatgcattagctcctggcagtactgtccagaaattaattcacagacaaccgagcatcattacccatggtctgccctggctaactgctctctctgttagtgaatttgggaatggaaatgagctatttccatccactttatcatccagagaccttagtacatagtgtatctctggtaagtgctgttattgtaacctgtttctagaattgctattaccagtaattctgcagaaacagggtcccacccaaagccatcagcacagtgcctttaaatctgaaaatcagcctttaatctctactttgatgttgttggcagaggtgagagttttatttcagcccaattgctgtgtcttttaatttttttaagtagtgagctatcatccctccaaccccctcccccaaacactgaagtccagaggccactttctgggagaaggttgttgtaagtggcccaggtgctggggctggtctggtaggaaggggtgtagagaaccgtaagggctccctacaggaaaacatcaggactagcacaagccacccttacaaaacacagagtgagcaatggaattggcatatggcaatgaggcctgcagggagagctcccttgaccttctgcatatggagtttagggtcccctctggaaggatccctgtgccgggatgctgccctccctagtacttcctcctcgttcccttacacgtgaagctcctgcctagctcttccctcgtggcccacactacctggctgagcatcccctcccatcatttgcagatcacagtggccccctggtctctaactccaggtttcacatctgagctccagttccacccccagacttcttgtcgcttgcttctcctgccatgcatccatcccctcacttgtccccatggacaactcttctctatggtgtaagcctttgctcttctgcaggggcctctccttccttccccccttcccttcctctggacctgctcaatgtacattctggctatacatatatttggtctcgggattcggtttctgtctgattctttgagtagctgccggggctcccggggcatggtctggatcctgctcatttgaatttcccctttccctgcagggtttgttgcacagtaggtctctacaaatatttattaaatgagtgtgcctgtattcaaacccaggagatgggggagaaagatcagagggaagatttgataaacagaaggcttccaagaaatagcttccaactccaatcagttctttttcattttattatgataagaacactcaacatgagatctaccctcttaacgaattttaaagtgaattgcaaattatccaaccaactgatgactgaaaaacgaagtgctgaaaagacactcaataaacataggccaccttggaaatgtattaataatcattatcgtcaccatgtggcggctgtggattgagcgtctgttctgtgccaaacactgtgctgagtgctctgtgcctgttcccttgttcacccctgccccaatcctctgaaacaggcctgctctcacccttagtggagatgaagccatggaggctctgaaagccacacccgccatcacccagccaggggccgcctgagcccagcaagagtccaccctgggggatgctgagtccctgcctctcaccaccatgcatgttgtctctgggcttctaaaaaggctgaatgatacaaaggtcttggggaggacccattatgaaaagggcatgttctttgttttggccccagtacacagcaccatccgcccatcattgtcttccattcaatctccagcatgatcagtaatatttgttagcgggagaggggctggtgtgtgggctgcagccaggcggcaatgaagcagaagctttacttctaagagaagctaatgggcccggtttaggggggcacaagcccctgaccttggttggataagcctctagcactaatcaacattaccggagaagtctgtatgcgctaacaaagcataaatatttggtctctattgaaggtctccagggccatggcacacagccgccttaaacatgcgtggtctacttgcttgttaggaaagagaaaacacacagaaaaacagccctttgaatccattcttccccatagaaacagaaacgatgtcctgatcattatgtctaaaaaagcagtagatacgaaaattggatttggttggagctggattttagctgcaaatgggtggtttttaataaagtgcctcatagcaaccgatctgtgaaaagctgctacttaaaagcaagttcatatgatctcagaaaatggctcatcagacagggcagtctctaactgtttatttatagtcgtctgcgccagatcagataagctggtgctcacagagttgggcgagggggggggagcttctagaatgtaccatccattggaaactcacagcctcggactgtggatgtgatcagaaaacggatcactgactcacacttttggaaacagggcccggtggggtgagagctatggggaggtaggctgtgttctcgggatagaggttctccaagtgctcagacctgagagttgtttgtgaagtctgggggctgaagaaataggactggagctggaggacaggcaccgggggcatgaatgaggataggcggattggggctgagtcctgcctatgagacgttttgcctgtttgaacttgagcgaatgcccttccttttcttttttctctatttatttatttatttatttatttatttatttgtttgtttgtttgtttgtttgaggcagagtctcactctgtcgcccaggctgaagtgcagtggctcgatctcagctcactgcaacctctgcctcctcgattcaagtgattctcctgcctcagcctcctgggtagctgggattataggcacacaccaccacgcccagctaatttttatatttttagtagagatgggttttaccatattggccaggctggtctcaaactcctgacctcagctgatctgcccacctcagcctcccagagtgctgggattacaggtgtgagccactgcgcccggcctatctttctttttaaaaagactttattgagatacaatccacgttccacacaatgcaactatttgaagtgtagaactcaacacttcttagtgtattcccagagttgtgtaactgtcaccactgtccattttggaacattttcatcacctcaaaaaagaaaccccatacccttcagcaatcatcccctatccccccattccctctagccctgagcagtctctgtctgctttgtctctacagatttgcctgttctggacatttcctttgaatggactcataggggatgtagtgctttgcgtccggcttttctcacttagcgccgtgttttcaaggtccttctgcgctgtggcctgcgtcagggttccattccctttcagggcaggccctttctggtcttcagattcctcattggtcacatggggtgaacgctgccacgggctccctgctgataaccttccactggaggggaatccaactcaagtgttagtgaggggctgagctgtggaaattcccccccaagggcaactacatctttagctctttatccctccctcacccccttaaaatgatggtaatagttgaatgctactgtatttcatccatcagaatagaatagctttctctcttcccccactgggactcctgttttgtcccatgcaaagcttggatgtgcatttgttttgataatagcaacaagattccctcggattttttgagctttcagaggggccaggctctatgtttgggccttacatacaacagctcatatggaccctgtgaggtagagagtcatggccctgactgagcagatgaggaaactgaggctcagagagggtcaatgaagtatctcatattctccacagaaggctcagttcttctgtaaatgcctctggggttcaagaaacgcagtgttcctggacttgaattttccaatacaagtctctggagtaggtctaagtggccctggagaagctgtgaaaccggtctccaagcacagcaccctgatacctggacacctacgcccccaggagtacagagaccttaacagacaaggccaatgagacagtgtgacaatgggggttgcagaggagcttggctggccctgagcaggtgcccaggagagggggcctggcagaggttcccccagaggtaacgcctgagtggtgtcttacagcacaaagcaaagtcaccctgggggtggaggaggccctctgtacatcgtttgattaacggtacttagaggaggtaggtacaaaatgctgcgggagtgcgggggcaggggtgattaatcctcctataatctgtttgccacagttttgctgttgcaggaggttttgctggagagatcgattgggtcttaacagagtggtgaaatggtgcagggactctgttgctaactccagcagagcctcacccagagggaggctcaaccctcacagccatgtggcttcggggatttcaaaccggtgcttctcttggtggactggtgaaattttcccacagaacccatttgtttgatgcagggagtggaaaggatcagaggagatgggaagagaacaggaagaaagggagagatagcaggaataactagcctcttatttgattcattattaaagaggtgaaggtgccccttcttccttacttccacactcagagtttctctcaacccccatcacaatcctgtgaggcagattcatgtccctcattttactggtaaaaaattcaggggcccaagaagtggactggcttgcctagagttgggcagggaatcagtgccaaattcaggtctcaaccccaaaactccaaatgctgtgcatggccagaggggagtaggagctggtggtgcccatgatgttccaggaacccctaagatgtggcctgatacaggggttgtacagatgatcttgccacattgctgggctggaggacaatttgggctatacacattgagctgtggaagcccagagaaggatgccagaatctgctggggcagtcagggaaggcttcttggaaaggggatattgaggctgggttttggtggatgtgtaggagtccttgagttcactaagggtggaagctcattctgggaatggaagcagtatgtgcaaaggctcagagttgggattgggggccttgtatctagagaacaatctgacttgcagagtggctgatggtaggatgtggggctagttcggaaagcagaggcagccggaagaagcatcatggttcacagctcctccaccacccctgtctgtcaggcactcacaaggtagacttttcctggggcaggattttactggaagttagggaactgttcattgctttagggtgtttggaagctaacaatggattctccaaggagtgagagcaaagccacaagcagaaaaggattatgctgttgaaattgtgtaactgcctccctctgttattttctaattaaggaaggggtgaggggagccccaaggctttgaagcagcaagagagaattctgaaatgtctccagccggccccacgagagggtctgattacagagcaggcttctccaagtgtgacgtcacccactgggcagtggggatcggtcacaggagtgggatgaggcttcagcgtctaaaccatagaactaaaatacctgcaaccacaggccctgaggccacaacccagcgtggcccttctcttcctagggtaatgcagtgggctctggacagtgtcactggaagcccgtgctgcgtgctggggcatttcagagggaagccccgagtgtggcattctgctctagctgttcatcttggctcttgcaagaggcattttctttctcaggagagaagcaagattctttctggaataaatgttcagatctaccagctccacagctggtcagaaggagggaaagaagaaagataggttatcactccaaagacttcctccagcctcatgaatgacctggatggtactatgggctggtagatttctgagaggtgatggtggcaccacttaaaacatatagccctgcgattatgcctgaaaatgccactctttgggagtcactagttcagcgaatctttactaagcatgcaccatgtgcctggcactgtgtcagggaccggtgaggatggtgaaccctgcctgtccgctgtgactgtgtagtctgcaaggagaaagcaatagacagatataacaactccagattggaatccactccatgagagaaagagggaagcagacaagggtggtgagaggtactgtgctttggagggcagctgagctgactccacaggaggcccagaggctgccctgcaagtgtggggaaggcgtgctagacagaaagggtggcatgtgctgaggcctctggggcattccagaagtcagcagaaggttcctgcatcaggagggatggaagcaggggaaacattctgaaggggaggcagaaagagctgggaggccagcttcactttttcaccaggaatggtccccaacaggatccacagtgtagaccttgccccaagagggtctatatagcccacctctcccccttcatggggagtagggaaggggccaacaggtagacttctccttccatttctaagtctttgcatcttaaaattttgtattctgtagtcattgaagaggttggagaatctttagtttgaaatgtaagatgatttcttcaggaaaaatgatcagattcctcctgacctcttgttccaaggagaataggtagtattttatcattgcggcattgtgtcatagctacagctaacaccatctgaatgcttgccaatgtaacaaagggaaaataaagtgggatgactcagtcttgggtcgtgaaagctcaggaaagtgagacaaccacctcccactgccagccttggtacagggaaggaggaagatgggcagaagccagtgccttcctcttgcccagccctgatctccacttagcagacatccagctgcccagcctggggtcttcaccatctcattcacctgtttggaatattaaccagtttaaaagagcttggatgagggatgctctgtgatgagctcattatgaagacaagaagccaacattgaacaaaataccttgagccaaacacattccctctttgaaggaattctcagggctagcatgctaatgagcattatgaccagcccataaggaggctaaagtatgtagcctttctcaaatgtacttaaggatgagtgcttattttaaggtacatcttataggcaggggattttgtggaaatcggtttgggatacaatgctttaacctgattcaattacccttttacctttgttgtcatcaagaacagctttaaaaatggcagtgagcaaccatccattcatccagtcaactacgtatccaaccacttattcaaacaatcatctgtttattcattcagtctgccatccatccatccatccatccatccatccatccatccatccatccatacacctatcatctgtacatataagcaggcagccatccaggctttccgtaccctgtacacaatactaggactttggcagacccaagactagatgttttcagggagcttctagtctaatataagactacctcccatacacaaccagacttctgggtgaaaagtgatttttgtctttgagaaaatgaaattctagaagctaagaaacggggaaagctcctctcctttggggagtccttgagggcatttttcccaggaaaagggatttggacataaaactgtggaagctggagaccagggatcccagcaggggaccagtgagagcagagggccagaggttcgacaagggcatgctgggggagccatcctgccccacttctttgtctctgcttggctgagtagagactacagtaccaataaaaggctgctgttcagctgccacattactggcaagaacatctctaacgaggcttaattcttccatcggcatgagtttccttaggtgctggcttcagaaacatttagtttatttagaatcagaggctgaaatgtgtttgtcttcacagtgcccacagatgaggccctgagaacctgtctttggctgcactggggctggaaagaaaccactgtccagtattaagcaccattcacctgggggccccagatgctgacttcccagaatattctaccacagggcaacagagttggcaagatctctatacataaccagaaagagatgagatccttggggctctgcagagaaaccacccgtttgcctaatagggccatgtgctcaacactcaacatggctgtgggctatgtagggagacccaggtcctgagcttggggtataggggctggcccacctgccgggcaccctgacccctggaggttacatcctaatgggggaagataggcagtaagcgccaaagaagtaaataagataacgacacactgtgctaagtacttgggggcgataggctgatgtgctggaagacagttttagacagggtggtcaggacaggcttcctaaggatgtgacatttgaactcagatgaatgacaagaaggagccaggcgaagtaagagctagggagggaaagctggtgccaagaccccgaggttaacaggaggcgacagattttgagagacagaaaggccagtgcagatagaggctgttgagcaagatggggagtggtaaggaaagtcactggtaaggtgggcaggggtccaaccactggggcctgtggccacaggaaggagtttcagttttattttaagtgcagtgaaaagcaaggggaaggtctagaccttccccttgagagattttgtgtttgaggtgagagattttgtgtttcattttgaaatccttgctccggctgctgagtggagggagggtgttggggtgagcgtagaagctaggagaacggtgaggggctggcacagtcatggagggaccagatcaggggtggagcagccaggagctggagggaagaggagggttggggatctggtgtggaggtggagccggcaggacctactgctggattgaatgtggctgtgggagaaagaggagaaagaaggaccgctctaaacggggcttgagtagctgggagatgtggctctactcctgggctgcaggaaggtgggggagaaacaggtttggggacagggaaagccaaagagttctgttgcggccatgttgtgtgaaagatgcatcttagctatcatggaggcagctgcatgtatgtctggacttggtgggggaaatccgaagcaggggagaatggagaccagggcaaagagaagcagaagcagagtcaagtgatagcaggacagaggggagggtgcacagctctgtgtgaactcccggatccaaccatgcctgaagcttgacccaccttggactccagttatgtgagccaaccagcccccacatcctttgttttatctgagtccgtttgagtcgtgcttctgtcatctgcagtggaaagagtcttggctcaacacaggaggcattttcagtatttcaggcggatataaatgcctttcctttgccttgggctggaattgcatcaccccagggtggcaagacaagaggtggtagccagctgtagaaagagtggacctttgccattgggcagactcaggagctggtcctggctttgcctctggctgcccgtgtgaccttggcgaaggagaactgcttctctgtccctccatgtcctggcacggaggggttgtgggaggacagcatgaagggtgcgggggcagcggctggtgcgtggcaggtgcttaataagtatcagcttttggcctctctcccccctacactgattaaaagctcaggttggcagttatttatgtctttgattaattaaacaattggaaaacaaattattacttaacaaaggcagtttgggcaacacaatctttgaaaacatgagggctggcggggaaaagaacaaaagtggcactcagcagtgaggatggaaactgccagagtagaaaatcttcaaggtccttctcatctggaaaattcaccttttctggatgtgcagaatatggctccttacagataaatgttgacttacggtttgagtggctcatcacaggtcacagcgccttcaaatggcagccaggtcagcactctggtgtcacctacatggactttatccaaggcaagaggtggagagggagaaactggacctgagtcacagccatgtggccggccgctgccgtcattcaggtgaaatccacctctgtcgctgttctccacggcccctcaacccccatggccagccctccctagtggctgaattaagcatcaaccactgggcagtaaagctcatagacccgtggaagtgcccttggctcaatgagggtggggagaggaggagagggggtgggggtgacccttgtgcttgagtttcaaaactgcccaagtttttcacctcattaagttatcatttgctttgaggaaaagttccctggagtccaggggttgtgtgatgaagtcccctccctccaccccgtaacttcctggccatctgtgtggctcacaaccctgaggcttccaacgaagagcagttcagccacccctcaagtctgcttcacagctggcatcacttgagcgcatcgcctcatttttttgaagggatcacagtagtctatggctttttcacctccaaacctgccctcactgggtgcaggagaaattctgatttgccaggaacctgtccagtcatctggaaccttcgccagggctgggaaggtcaactcctgccacaggtcatattgattttattggatggctttttccaaagcagtggaacagcagcagggcacggcaggcagggagggtttccagttctgcgtgtgggcacacggcccacgctgccttaaacggctctcctgctcctcgctggtacagggagagggtatggggctggcccacctacaatcccctcctagatcaggcctttgcttgcattatcagagcgggactgtcaacctggtttccttaaattgctgtgtgaactcagtccatgtgtcgccacaaagcaagacaccccatccgccccacggaatatatgaagcgtctgtgcagtgactgctgtcgactgcttcctgggagctggcaaggaagcccctgctagcccctgatagggaagagacagccctggaggccagagcagatgtgccttgggaagagtcaaaagggaagagggaggggtgggctgggttgaacgcctgctggacctgggctgtatactttaccatcttccaagggaggcatgatcccattgtacagagtaaggccctgaggccaggaagggcaaggtgacctgagagctggcaccagaagccaggcctggctccagagtccttgcctgtaacagagagaatggatgttctctcactttggtacacatcaaaatcagagtgcttgtcaaaatgctgtttcccaggccccgacaccagctcctgggggtcagacttctctggatagccaagtcacagatgtgtactgtgtactggcaggggccaaatgaggacccatggctacactgctgactgaaggtcttctccagtgatgggcaaatgactccggacccatgaacaccaggggagtgatccagggggagagaagatgtctcgggctctctggttgcaaattctaacccccatcatttgtctgaccctttctcaatccaaatggttttggaaatgccagcacacactctacttcctcggaggcacatctgtgtttcgtggtgcagcaaggacagcctgggtgcaggcacagaggtctgcagtcacatgggagtttggaggctgcaagttgcttgatgctggtggatgatcaagtatgagacgtgttgtggaggggtagataagacagatcatgaaggtcaaatattgtatctgtcccctctgccttttttgttccccggagtggtgacaggaagtctcataaggtttttaactgggggatgaaatggccagtcctaggtgtttgaaggctcaccctggctgcagtacagaaagacaaagctgggccagggccacgatcaattaggagacttgtgtggtccaagcaaaagatacagaggcatttgagttcagattaaccagaatgaggagtccttatagatcaatgagagcattcactagagaaaccagaagagccataccttagcagtgggcctaaattattcctacagtaagtgctacattagacccaccctaatcaagattataaacaagtctccaaagagtcaaactgaaccacaagtttgatttgtctgaaaaagtttttgccccccaaagtctttattttataattatctgcctaccaaagcaaagcccaacactttggaaggaagacaacaaaattttagacactcaacattgaagtgtctaaatgttcttagagcggaaagaaaatgatgccagatagaaatttagatctacaaaagaaatgaaagaataacaataacaaatatgcatgtaaatatgctatttttaaattttaaattaatttaaaatagatctggccatttaaaacagaaacaatagcaatgtgtagtgggatgtgtaatgtaattatcataatgttcagcatccaaacaaaaattactcaatatgttaagttgaacaatgtgagacaatcagtcaagagaaacagtctcagaaatgacaaggatgatagaattagcaaacaaggacattaaaacaactattaaatgcgtattcaattattcttaaaacatgaacatagtgaagagaggaatttaggagataaaaagcaccaaatggaatttctagagatgaaaactacaatatcagaaatgaaaaatataatgggattaacagcagatttggaaatagggtgaaatgagaagtgaatgttaagacatagcaatagaaatgatccaaaatgaaacagaaaaaacaagacaaaaaaaatgaatagactttcagtgacctgtgggacagtatcaagcatgtgtagtttgagtctcaaggtgagaagtagggggagagggcaggaaaagaaatgagaagaaataatgattgaatattttccaaatttgttgaatgctataaatcctaagatccaagagcctcaactagccacaaacaagattcacacacacacaccacgccgcacagcaacatatatcatatttgaattactgaaaaccagtgatgaagagaaaaatttttatatagccagagggaaaatgtaagccaggagacagtggaatgacattgtcaaagttctgaaagaaaaaaacttgtcaacctagaattctatacctgtcaaagatatttttcaggtgagagccaaataatgactttttgacaagaaaaaaaaaaaggtgatagaatccatcagaagaaacctggcaccacaagaaacattaaaggaagttcttagagcagaaagaaaatgatgccagatagaaatttagatctacaaaagaaaggaaagaataacaaataagtacgtaaatatgccttttcatttttaaattaatttaaaacagatttggctgtttaaaacataaacaatagcaatgtgtagtgggatgtataataagtgaaaggtatgaccacagaggaaggaagaatgagagggcaaaatggaaatctattatttcctacattgtatgaaagtggcataatattatttgaaggaagactatgtaattaaaaatgcaattttgtaaaagtaaaattaaacaagaggtctaatttatgagttgacagtggaaatgaaatggagtcattaaaatgctttataccattagcaagagggtagctataaatccaaccatatcagtaacattaaatacaaatactcagaacactccaattataaaagacagacatgatcaaattggatataaaaacaagacccaactatatgctatcttcaagaaacccacagtaactatgaagatataaattcaatgatggaagaagatatactatgcaaacactaatcaaaagtaggcccagagtggctgtattaatcaaggaggattaaaaacaagaaatattatcagagttaaaaagagaaattctataatgatgaaggggtcaattcacaaggagacataacattcctaaatgtatgcatataaataacagagattcaaaatacttgaaacaaaaacaactgaactggaaggagaaatagacaaatctaacaatacagttggaaatttcaacatccctggattgataaatgtagaaagaaaatcagtaaagatgtaaaagacctgatcaatgttatcaaccaacttggtttaaggaacattttaagtgtcattccacccaacagcagcagaacacacttccttttagagcatatgtggactagtcaccaagatagatcatagcttaaaaatggaaacaaaaaccctgacattatcaagtgctgtgagtacgcagagccactggacctcacctacattgtggatgggaaggctgaatgatgcagccactttgggaagtagtttggtactttttttttttctttttgcagccatgacctccggggctcatggaatccttcctcctcagccccccaagtacctgagactacaggcgtgcaccactgcacctggctaattgtgtgtgtgtgtgtgtgtgtgtgtattttttgtagagacagggttttgccatgttgcccaggctggtcctgaactcctggcctcaagcaattctcctgccttggcctcccaaagtgctgggattacaggtatgagccattatgcctggcctggcagtttcttataaagttaaatatacatctaccataacacctagcatcccacttctatgtacttacccaaaggaaatgaaaacatatgtgcacaaaaacatatatgtggatgtttacagtggctttatttataatcgcaaaaaactggaaacaacccaaatatccatcagctgatggatgggtaaagaaaccgtgccacagccatatgatggaattcctactggaactactcaatgttagagaggaatgaagggctgatacccacaactcagatgaatatgaaaggtattatgatgaatgaatgaagctgggcttataaggctacaaaatgtatgactccatttacatgatatttacattccagaaaaggtaaacacataggaggtggagaaaggggactgattaaaaaggggcatgaaggaactttttggaaaaaaaaaaaaaggactgctgacatggttaagaaaaccaaaagacaagacacagagtgggggaacatatttgaatgcacatatctgtaaaggacttttgtatctaatatataaataacttttactattcaataataaaaagacaaataacccatatttaaaatgggcaaaggatttgaaaagacattctaccaaaaaagacatatggatagctaattagttataaacgattcatgtaaagttgttcagcatcgttaatcatcagggaaatgaatattaaaagcacaatgagataccactatgcttgccagaatggctaaaattaaaaagatagacaacactaagtgttgacgaggatgtggaaggactggaattttcttttcttttcttttctttttttttttttttttttttttttgagacagagtcttgctttgttgcccaggctggagtgcagtggtgtgatcttagctcactgcaacctttgcctcctgagttcaagtgattctcccacctcagcctcccgaatagctgggattacaggcatgcaccaccacacccagctaatttttgtatttttagtggagatagggtttcaccatgttggccaggctggtctcgaactcctgacctcctgacctcctgacctcaggtgatccacccgcctcggcctcccaaagtgctaggtttacaggcgttatcctagccaagggctggaattttcctacattgctggttggaaaagaagtcagcagtttcttaacaagctaaatatattcttgtcatttgactcagcatcctgcgtggtgtatgcgccactatggaaggcagttagagaactgctggtcataaactccattgtacttgtgggtctgctgtggccacactggtcccttcagggtctatggctgtgttggtctttcatggtctcgggttgctatgtctttttatgtgcttgtgtccagtttagacagtttttctagcttgtctgacagcaggctgtcagaataattttttgtcaatgtttctatctgcagctgctgcctttctttttctttttctttgagacggagtctccctctgttacccaggctgaagtgtagtgtcgtgatctcggctcactgcaacctctgcctccccgattcaagtgattctcgtgcctcagcctcccgaatagctgggattacaggcacacgccaccatgcctggctaatttttgtctttttgtggagatggggtttcgccatgttggccaggcttgtcttgaactcctgacctcaggtgatccacccgcctcagcttcccaaagtgctgggattacaggcgtgagccactgcaccggctgtagctgcctttatttatttatttatttatttatttatttatttatttatttatttattgagatggagtctcgctctgtctcccaggctggagtgcagtggctcagtctcggctcactgcaagctccgcctcccgggttcacgccattctcctgcctcagcctcccaagtaactggaactacaggcacccgccaccacgcccagctaattttttgtatttttagtagagacggggtttcaccgtgttagccaggatggtctcgatttcctgaactcgtgatccgcccgcctcggcctcccaaagttctgggattacaggcgtgagccaccgcacccggcctgtagctgcctttctttaaaggtgactttgatctgctgtgctttcatcccagcaaggacactgactgtcattcttactgttgtcttaccttcatttctttatgccttttgccagcattacctcattttgtctgctggggagggactgtcactctcatttaccactgttcgtcagctctggcacagcgctgggattcaagtaggtttgactccagtgtgttctttgatcacggagctgacagtatgaagggaattcagaagttgacgccatgttgcccacagacagacacgaacagagggagggtgggggagagagctgcgggggcaggtaggcttcccagaggaggtggaacaagatcccaacctggaggttctggccagtagagaaaagccacaagcccagtgagaagtgctcaaggggaccagcccagtggtgacctgggggacaaggggagagcgctagctggaagatgaatgtggtgctaggttatgcagggccttgaatgccagggcaagcattgggtttgatcatgtgagtgggcactggaaggcaccatgcccaggtgccctggctagggaactcatgccagtgatcttgggacgcaagcagctcatgcaatgaaggctgtgccgactagtggccattcgccgtgaggtctcagctaccttcctttgcaggaggggcagggtagggctccaagctcaggcagtggacaaaggatggactttccagctttcctggtgctgtccaggggtgttctgcctttcccaggcgataaggggtcctctgaagccccgtgctcttttctgcctctctgcttacctttgaggggtctcagccttcctcactgggattaagtggccacagttagtattaagtttagacaggtgacccaaactatgggcagatgtgcctcactgtctcccaggtgcacccccttcgtggtgagttggcgaggcaatgtgaaatcacacacacccagtgaatcttcgtcccatggctgcagcgggaaggcataaagcagtggcagaacccacgtatgcctgagcacatcattgtcatccatccctggagacgtcctccttgtccactgcctttccctcccgagcaggaccggctacagaacttgcagggcttagagaaaaataaaaatgcaaggttgctccctcaaaaaatattaaaccaagtgtgggcccctgctcagcatggggccctgtgtggctgcatagccacgtgcccatgaagctgcccctgttcctgtacctggcctcattccatcctgcaggggaggctggatggacctcagagggtactgcctctaattgtggggcctccatctgcctgtggctatttgcgttctggcagcactgagcccccatgcacctgggcatggggccttttagcgcctggctcatttggtcaaacctggctgggtcctggctcgccttgctgttgacgggtgaggatgtgtattctccattctctgccaatttctcttcctattcgtctattcctcacccccgaatttacagtcttaacacattgtctttcctctaactatgccctcctccaaaacaatagatttcgtccagatcaataccagcccatgcctctgttgagcctgtcagtgggtttcagggcatcctttcatatccctaagagctgatcaacatttcttcttcaatgcggagctcaacctctgggctggtcgtggctgtgcgacttctcaggaggccaggcaattagctaagacactgtttcttctacggctttgatggcatccacttccttcctgcccctccaggagactccgtctccacctctcagcctggggacaccacgggccctatgaacagaggcccagccatcacccagagaagtgtgagccaactgtatttcctcagtggctcattcattcatttgcttcctctcattgtctccagtgttgtgggctggccagagcacaggtgctggggtgcagggatgaaaggcaggagagggtggggaaagaagcctcagaagccccacaccctccagttcaaatcccagctctgccatttactagatttgtaactttgggcacgtttctgagcttctcctgtcctcggtttcccagcacctgcctcacgggttgtggtgggaatgaaggggacagggaagaggggcagctgccctcgaagggctcggtgcctgtgacctgtcgtggtccgtcatgactcacagccccagcctagacttgagccttagggccgtcaggaaggcgaatgtcgggtagggcagtgggtggcatccatggcggggaaggccgggagcctggatactgggagacatcgttccttgctctgcactgttccccttggacaggggcctccttcctctcagcctccaggctcggactcacctgtgcctcctgccccctgtagccaccctgcggctcccagagatctcccccacccctctctaaagaagggcctcttcttacatgcccttcaggtcccctgcacctttctgcgctggcccatacatttacattgaaaatatctatgtgattatttggtgaatgtcctccctcacatcactggaagccccatgaggacagggactatgtgtgcaccatcgtatcctgggtgttcagcatgaggccaggtatcaaggccaggcttgagaaatcttttttgcataaataaatgagtttctggctgagagaaacagggagagagagagagacagagacagacaaaaacagagaactccaagggggcctcatgcctggggtatagacataggggagttggcagtgggtccagatgtctggggccaagaaccatctggccctgtgcccatggataaggattcgggtctttctcccgagggtcctgggatgcctctgaagggcatctcggggccgtgggcctgcatccgatttgcattttaggaagatcaaccggcagctgtatggagagtggatttatagcctggcttctttgttcaaatccccagagtcattttcttcttttttataggattctgcttgttagggacagagccaggagctgattatttcttcctaactcactttgtgaccttgggcgagtcccaccgctcagcagaaagcaggcgccggcccctggctgttcctcccagctgcacagctgtggtctcccaagatacccgttcctcccccagagagccctcacctgccaccctcctggccaccggccatggatgggggtcatctctgcaccgagcttgccgcacttgtggggtctccctgctggtgctgctgcaggagggggtcgagctgggggtgtgcggacacctccctttgccaatgactcccacacagttgatgagaaatccattgggtcctgcctcgttttgttccccgggactgcagctgttgctccttacttaactccagcattccctcctcatgcagtcccaccctctcccactctaccctccttgtgggggctgagacaggatggtggctgtccagagccacagccagcctgcctcctccacacatgggcgcccacccacccctccgcacaccggggccgtcggggggcccgcttggtgatgttttaagtgaggccgacagaaaaaccccactccactttccagcactgccaaaaacagctctcccgctagatttataaagtttgcctaactttccttctgccacccaggagaggccttccgtgcatttgaagaaaacacctcccccaaccttttttttttttctctgaaaaacagatgaaggttttggctagaaatccagaggtctggggggcaggcgtgtaaattcaatggcggtttattgccctaaggaaaacatacctgggttatgaagtattcccccttgaaatctcacttgacattctgtaaagaaagaggaacgtttttaagaagttgttggagccacctaataccttccctacaaagcagagcctttttgaaagattaatatcgagctgcagacagtcagtcaccataattgtaccgatcccggcgtgttcctctgcccatgccgtcggggtgctgggagccgcaggagagctccatccggagtgcccgggagttggggcctccagcttagttccatgaaaggctgccagccccggccctgggtacccagtcccagacccagacccacataggccagcacatttctgctgatgatctttcttaactctttttcctaagccaaggaaggggcaacgctgcgtttggggtttgtaggcatttattaatggaattaaggacgatttgcaagaaccctctactgctcacaccacttccctcgtgtcattgcgtaagaggcttttcctgggcagctctacctacctggttgtgtccctttaactggagaaaaagggaagtttgggggggttgggggccctctgactcggaacaaagtcttcctgcagatgctccctgtagtgccgtgggctggttaacgtgaagtgtgtgcacgtgggtcctggccagcacagtgtgggtgaaactccctccctcctccaaggtcatgtagtcgcctcgcagatgtggctggtatggcagtgggtttcaaggctgccaaagcttagaagtgtcacctcggacaacccctgcgggtgcctcgtaaccggaagaatggggcaaggtcgagttgccatttggctccctttacctttttgtccgcgtggtggtcatgctaaacaggccctgaactcccacttgggcacccctgggacctcagcttgcagatcaggggctggctatggagaaatgtgaggtcccccctcccctcatctatgggagaaaaacaaaggcctaagcgaaatgactttttttgaaagcatcattccatacagcattaattttttaggatttcttctgggaggggagatcagatcagaaccacaaatgatatgaaaacatcaatgtcttcatctggagaggagcgggtggtgcaaaggtccgaccaccacgaggtcaatcctctcccgcccagcgtgggctcaccgacctgccatggggtggatgttgattaacttcatccagggtttccccttggtgtctgagggcaatttctgacccggataaagctggctttcaccacgtgacctttacagaaaggcagtactgtgtcccctctggggtccccgaaataataaatcaccagaggcccagtgagagatgaggccatgcgaggaggcagacaaaggacagaaacggacaataaatctcacttctagggagcagtcatttcttttttctttgcagtaatttttgtgaaatgtaattgtgatccaataatacaaataccaacatctggaattctgcaagcgatatctctgcctgttctgtttggaaatggagtacttggcaggcatactttctttcccattcatggacagggagcaaagcgttcaggggagggccagaggggagagagcactgccgtctgctgatcgtggatggaaccctcatttgagaagctccaaaggtaggggtcatcagtcagaccccagcccccctcccccaccccccaccagccactgacagtcccaggagccaggcatttacaacccaagcccacagagatgtggaaagaactctcagaaccaacgtggtttgaaaagcaccaagaaagaagggagacttggtcgaatagccgcacttatcctttgcatttctgtcctgggctaaaaatatgaattctagatcatgagattgaagattttttcttttttttcttctcaaattaaggtccagggggaaggaagctcagctcacctataggctgaaatggttggggtgtgccctgtctctgcgactcttaccgccctccttggaaattcttttttctgtgggtttgggggctttagtacctttaaactttctaaacctttctcaggccatcagaggaaaaaaatgcatttccctaccccaaatccaagctctgaagaatccacagtttgtccattttcctcattcgatgaacaaagaaacattaaactcaaaaagacaaaagcggaatgtctacaaaatacctcagaacagtcttcttaattttaggggaaacgactgggtcattttcttccagtgctgtcagaaagcaaagatcctctcctgggagaaagactgcttcaaagtcctccaagatgtgaggagtccctgtggttattaatttttaacttttggtagtttttattacccaagcttgtacatacctcaaaggctctaagacaagaaagacggctcaaaagagttttgctaccacttaaaaaaacaaaaagaaaccctacagttttaggattcatggctgggcctctgctgtcatgcacccagagtctggagtgaagagaagtaccaggtgtcctaagaatgctacagcggctgccttcaaaccaaagacctgcacagttttaatgaccagatgtttatctagccagaattcattttgatgtgtgctttacaagccactggtcaagaaagaaaagtagtttaagcccaaaaacaatcactaaggtcagaaatccaacagtttgtaaatctgtagaattttatgccttggggataacaaatctttatttttctttagataatgtaagttggacagaagtcataaagagggaagtcacaaaaactgtttggactatgcccccgcaacgcagaaaatcacagtcgcccatagaccataaggaggaatgccgatgttagggtctcgcaaaccaaggtagcagggccagtactgctcgactgggtcaaacattttgttcttactgacttcctaaccttttcccacttgacatctttattgagcactcgtgaggaggccccagctgcctcggctccgagcacattcatctctgggcgcttgcatttttgcaggggcagttacattttccgttttctagccaggaatggaatgttgatactgtgtgattattttatttattttatacgttttccttggaatgtctacgtgtggccgctgccctggcttggtggcctcttgatttacggtagttataaacattccaaagtagacatgtcagttaaatgataccataacattatacagttacaattctgttctaaatgtgcccagagttccaaaaaatccgttttcagctcccctcctccaccccattccttcctgctacctacgcatgatggcattggaagccactagctcaatggaaagaagacagaagacctaaggtttactcgtagcctcaccaccccctagccccgccttctggaaaaaacattttttttttttttttttttttttagatggagtctagctctgtcactcaggctggagtgtggtggcacaatcttggctcactgcaacctccacctcctgggttcaagtgattctcctgtctcagcctcttgagtagctgggattacaggcacccaccaccacagctggctaatttttgcatttttagtagagacggggtttcaccatgttggccaggctggtcttgaactcctgatctcaggcgatccacttgccttggcctcccaaagtgctggaatttagaggcgtgagccaccatgcccagccggaaaaaacatttctaagaagcaagttggcatccagaagtaacatgcccctttagagaacacatttgaactttcttcctactgaaaatcacgtttattcacatcatgcatgtattcccaggagaaagtggttctaagatggtggccactgagtaattctgggaggtgacctgtctctcaatcccctggcctgctgcctttaccgcccaccaacaaagaaagagtggtttgtgcttcctaaaagatgctgagagagggaaggaagaaaatatctccacggacatagcaatttggagagcttaacattcaaccagaaaacccacttcagcatcctccccaggagaactgtcagggaggaattcgctacatgccttctcacagaaaacactgggacatgggctgctttcactgcccaattctaacccttggacgtgtacaaacccgacaactgatatctgaagcaaaatgtacacctaaagaatttttattctctgtgctagagcaggggttggcctgggcttgtttttgtaaataaagttttattggaatgcagccacgctcatttgtggatgtcttgcttatggctgcttctgtgggacaagggcagggtttgatagttaccacggagacccaacggcctacaaagccaaaaatgtttactgtttggtctttcgcaggaaaagtgtactggctcctgtcctggatcaactcagaaaatgaaacacatcggattctgtccaggccgggcacagcaacctggcccatccatgtggagcctgcagtgaccacttccgctgtctgcacaaaactggagggaggctgggggtgctccaagtataagtttcctcatcagcaaaccggaaagagaaagaccgacctggaggctggttatggggataaaataaatatgtccttatatatgtgtataaagccccagcacaaacagcagtcgccgcatgggtcagggaggcactgcttggagccttatgtgaccgtgttctcacattatcttccaactggtttgggagacaggtactgctatgatctctgtattacacagaagcaaactgaagctcagagtggccgctcacttcactccgaacagaaggtgcttgagctctgtgctgatagatggaatcccagattttccatttaacttttgatgttgtgtcgtgggagtggtgttccacctttggagggttttaaggactctttattaaccagcaagggttcttgtgcctttaaggaggagtgattgagaggcacctgcaaggccggtggaggctgctctggaggcctgcctcttccagcccacaggccctgcttcctggaactggtgtgggtcactcattccagttcgcctctgaaactattttcatgacagtaagctgctacctcaagaaacagcaacagtagggattttgcctgtcaggtaaggtgcttggggagtgaaggctgtggtcaggatccaagcaggaagcctgagttcatgtctattcttcaccgagcatggccaagtccatttgagtccatctccagaagacatgtcaaaatcacccacttatctccatcttcaactcctcccaggtcaccaccttatcttccttagatgactgcactagcttcctgactggtttccctaaaacccattcatttatctatcccttctaccatttctcccaccaaacatccatctcaccacccaccatcctgccacttatctttccctccctccctcattcccttcctccatctatctctccatccatccatccatccatccatccatccatccatccacccactaatatgtatttagtggttacaatgtcccaagcactgtatgggtcccagtgtaggtggaaaaggaaacagatttcctgacctcaaacaaaacaataaatttcaaagtaagaagccccacgagggaggaagtgtaggctgtcttgaaagaggatgatatcaggagacatatatggagagggcttggaggaggtgatgcgcctcaccaggaggtgatatactgatagagggactatataatttattgatcaaacggggccattttggggagtgagaggaggagctattaaacattttttcagggcaccaggtgcatgtcaggactggccaggtaaactgagctgcatggctacctcctacaagccaaggttcacagcatgagctgagaaaggggcaaggaggagagaaatgccccttcctttccttggggagagcctgcaaacctacatttaaaagaactaggagaaggctgggtccggtggctcacgcctgtaatcccagctctttgggaggctgaggtgggtggatcatgaggtcaggagttcaagaccagcctggccaatatggtgaaatcccatctctactaaaaaatacaaaaattagctggaggtggtggcgtgcgcctatagtcccagctactcaggaggctggggcaggagaatcgctggaactagggaggcagaggttgcagggagccgagatcatgccactgcactccagcctgggtgacagagtgagactccatctcaaaaaaaaaaaaaaaaaaagggggctaggagagaaagtaaagaggaaaaagaaagagctgtggagtgctggggcaagagtgagttttggggatggaggttaagcaaataagagtctcagggaaatgcgggatggcagagttgggggagaggagaaaatagggtataagaaatgtttttctgtgttgtgaattgggctcccttcgatgctgcttttactgttgtctatcaaaagatgcaagtgaaagagtggcattccctttgctttctctaaggcgtgtttgctgtttgggatgtgcatcttggactaagtctccttctggagcttggaacaccaggttctgccgtcacaacctttatcatgcacaggtcgccctggcatggacaggaccttagctttattgtccgtgctccctcgctcaactgagagctttctgagggcagggcctctgtctgcttgtctctagtcccagcacctagcacaggctagcatttagtatgtgctcaatagtgtgcagtgtagggacgagtgcacgggctccagcgtggttaatgtccttcacaaggcgccttggaggagccgtccccaagctcatgcttcatttcacatcctgctcctgcagaaatggagcagctgctccgcttgggttatttagtgtcggaatttcatctccccccatgccaggctgccctcgtctctacctccatcaactccccaaggccatccaaggagcctcatggaagcagatatctgcagatggcttgtgtgacccatggatgggtattgagcttcacgcctcaccgccttacagtctggcctcttcgtcagcatcagtgggacaggcagggtctctaagaagagctccaagctcccagaggccctgccaggcagttctgggctggttccctcaggggtcaagggaatcatggccagcgtgggtcacagttgcgggctggggagtctcaaccactactcttcctccggctagctctgtaattcggagtgagccgtgtggactccagcctcagtccttctgtaaaatggagacaactcagcaccgaaccctatgcaataggcactggacacgccgaggtttatcaccaccatgacttggttaaaggctgctcggcctctgggaggacacagcactggctggggaacaaggctctgcggacacctgacacccagggggctgcaggggaaggggggtgctcttttatctatttctgtcctcaaaggtgtaggaaattgttcatccaggccaggtggccgggcctcactgcctctgtgatagctcagcttgttagctagcaaaggccgcacaaggcaggccacgatgttgactgcacctgccacgggctttctgtgactgtgctgaaacactaatgccagctgtaattccctcctggagacctggtaatgagggctggcaccatgtccccgacatgattgaaaacgggctttgtttatgcactctcagagcagatgagacgtgcatttaaagtggtccagcgaatttggggaaaggaaggatgcaatttcttggatgggagacatttctaaggaccccgccctgagtctgatgaggtggtggggggattgttggtgagggctcaggtttataggtgactagcttcttgattgaggacacagtcttaggagaaacccagacagcacggttgcagcagtccatcccttcattccgccccatgtgggcactgcccacatgcccaactttatgtgtaccccatcccaggctggtgggctgggatcagaggccagggaggagtggtgttgtttgaggagatttgattaaaggtgtgcagatgtgggcagggcttagaaaaagcaatgaagggttggtgcagtccaggaggactgatcacggggggagcagttcccactccagggacataaggcaggggtggagccatggccagagccctgggagggtggctccatggcaggagcgcttggaggggctgcggcctttagcaaagcaacccggagccagtgccacccggccagaagacagccaggaaagtaaatccccccaggtctcccgcaggtgcctcttctggccagaaggcacagggacctgctaatggtccgtacggagtggcctcctggggcccagagaaagtagagaagtgtggacgtggatgtgagtagccatgggtcgtacccagcacaggtcagctcccgtggagtttccagcatctggtgtaggggctgcaaactcagggacctaaaggggccaggcaagtagttaatataaatgaggggcgccagacaggtgtgtgagataagggaagggtggggagtgtggcaaactagattgctcatgccaggagagaaagaggcccagaatggacagatcctcccattttttaggcaaaagctggaaattgggggtttttctgagctctctcctgattttaaattttagcagtaaagtcaaacttctgaaatgaaaacaatttgcaagcaagacaaatgaaatttgtctgtgcgggggacatcactcttgggctggtttggcgcctccggtcagtaggagcgatacgacaaacgagtgtaagggaccgagctggactcgctctccagggctcggaggcggggggtggtagacaagggcaccgccggggttgccggctgagctaaacctgccacttgtgcccagcacccttccgagtgttttcacgccctcgtctgttgtcttcaatcccaccccatcctgcctcccccatgctctatcactgcactccgtctgttcttcagagcatttacccaaatgtatgattgtgcatttctttactcatttatttgctctttttcccttcccgaagacgaggcatatgtctgtttcctcccttgttcccagagccaggcaaatacaaaatgacagatagctgtttgtgcagtaactgctgctgagccccctcaggagggaggcattgttattcttattcctagtaggagtagaagccgtcatcgttgtagtcatcacccgtgtcttataattgaggagacggaagcacagagtggataagggacttagttcagattgcacagccaggaagcactggaatggggattgaaacccaggactggcaggttctcaagacccctaccctcagctcaaacactggctcctccctaggaatccctcaatttgagtgtagacctcaccttttccaagaagccctccctgacttacctgtcagctgggtcagtggccgcctctgggatcctctaaacaggatctacctctccatatttcactttcctgcttccctgtcttgagctctgggttgtcaagttcaccttgtaagcagacaggtggttttgttcatgctttctctccccaccccttacagcccagtgcctggcctgcattaataataataacaacaacaataataatagaagagacagctgtcatgctgagtgcttcccacgtgccgggcgccatactcagtgcttcctgtctatgcttttatttcctcttctccacaaccccatttacagattcggagcctgggactcagacagtagcttgccagaggatacgtagctggtgggaggtggaagtaggattgaaatccagccctgcctgtgcctgaagccaccgtactggttgtaaccaccaccctgacagatcccactgcagggacttaaccatcaggtgatatcagggaccagggtgtcagtactcctggctttgcggccgtgctatctctgctggaacccttaaccccgctgctgccatgcagtcagccagagactgtccataaaccaatgggcatggttgcgtttcaataaaactttatttataaacacaggtgataggtagaatttgggctacggacctcagtttatgactttggcgtatgccatggatgtcaatgttacaagacgtcctggtttcagacacgtgatgtaaaaaaaactgtgcatcttagaatctaggagaagtgatatttgttgagtgaatgaatgaatgcgtgaatgactgagtcaggtgtgtgcccctgagtgtttggcagggaagatgggcacctggcagtgagtaccatgaatgttgcatgaatgtcctccgagtggcccttactctcaccctggggacaccactgtcccacagcacataagtggaaactgaggccccaacaaatcaagagtttgtctctggccaactggcaacagcaattcggtgaggtgccagcttgcttagcagggcttaagaagcaggtgggcaccattcctcgtcggctgaggaagccagccctcaaagtcatagtgcataaagaataacttttcactttaattccatccagattaattcagcgagagtttattgaacacctttcatcatggctggatgggtgagtggtgcccataaaacagggctcctgccctcagggagcttaagcacatctaatcttataaaccacccagatctaaaaccagcgtgagaattcagaggcgccaagccccctgcccgtccccatggagccttctgagggctgcaacgtggatattttccaggcaggaattaatcacggcttcgttggcgctccaagccagaccctacataataccttctataaagagccttattacaccggaaggttgtatattatattcttcactgcacaccagctacgtgcgtaggctgctccctatgtccctgggccaataaattagatttagattacaaggggaggaaaggcggccccgcgcgtgaatacctaacagtcactgtggaccgagatgtcttgatttagatggctaaatggcccagtgaaggggccaagaggtcgcaggttgacacataaaaagctcacagcctccacaagccaaccatcaccttgagcaaacaggcccgccagcgggggccgggactgcaggctaattggcagcttggatccaacgtcacgcttatttcccgaacgcaactcacttccagctccaggttattgatccctgttgaggagggtggtctggctttgatgcagaggcccctcgtctggctccagagttttccaacttggggcattaatgtttttcaagtgcctctctggaaccagaggctaggaaagccaatgtgaagcggaggcaaccccagggccctggtggggtgtgtggagaaccgtggctgtgaatgggcaggtagaccgtcttgctagaagcagagagggaggagcctcctgtggcagcaggaggggacacagttgctgggaggctggtggtggggctccccaaacttgcctgggggaggaacccctaagctggagcttctgattcttcgggcacccactcgaatgcttctctgggatacctctgtggacccacaactgctgggctgcagtaactacacgtttcaagttttcctggattttgttacactgctccatgacggctggtgggacgtgtgaccccagaaagaagcagtgagatgtctttcccactcttctttgtccacaccaggtattatcgacattgacagctccttgccaatctcatgggtgcagagtgccactgccttgtcattttaatgtgttttttgttttgtttttgagatggagtctcactctgtcacccaggctggagtgcagtggtgccatctcggcccactgcaacctccacctcccagattcaagcaatcctcctgcctcggcctcccaagtagctgcgattataggctcccaccaccagacccggctaatttttgtatttttagtagagatggggtttcaccatgttggccaggatggtcttgaattcctgacctcaggtgatccgcccgccttggcctgccacagtgctgggattacaggcgtgagccaccatgcctggccttaattggatctcatacatttaaaggagtaggaattagtcaggtaagaaggaagaaaagcgtcttccagaaagaggcaactatgggagtaaagagacaggaggaatagcaaagtgctcagtattgctcaaggggctcgctgtggagaggttggagaggtggggtgctcaggcatcaccttgcaagtcagaaacaggccagtccgtgtgattgttcagcttcccaggtgtgccctgacacccatgtgcagaagagatgattatgggacatttcagagatgaaggctcatgggagagatggggtgggacaagagagcaaggtgctggctggggagccagcatcaaatcttagccctgctgcttgctcagcgatgtggccttggctgccttcacctccccaatcctcaagctcctcccctgtcaaccgaggacaagaagaactcttactcttaggcttgtgatgagaaccatatgagacgatgtgtggcacgtgcttagcaccaggcagggtatggtgcatgagctgaattgtcatgtgtcacatcatttccatggggctcagtttagaaagaaggaaggccaaagtggtgctgatgaattgggagaaagtggaagagtcaggttcagggggcctcttgaggtgaaaaagcatgtttcctggaagcaaaggaagaaggaggctacggagagagagaaggagagagagagagagagagagagacaagacagagagagaggggggatttggaggctgcaagatgaagcaattcaggatccaatgagtagcaaagggagtgaggggatgagaagtggaggaacagggaaaggagggtcattgggcaaaaggccaaagagccgggaggcctggggttgggggacagataggtggcccattgggacgtttagctgaaaccaagttgatggtagaatatgggatggagaggtctcaaagcggtggaaatggaaggtgtaggttagccaggttgcttttgtttgcaaagaaatggaacccaactcaagtaggtgtatgctaggaagagggacactattggctccttaaccagaaaagaccaggaatgatggtttcaggaatggttgaatccaggcgctcaagtgatgtcatcaggacttgcctccctttgccttctctctgttctgctttcttctatgttagcctcattctcaggcagtctctccccaggtggtggaaatatggctggaagcagctcgttgcctacgttcctcaggtcagcaagcccctgggcagagatcactttgttaaaagtttccgtggaagtcctggggttgaatttgattggactgtcttgggtcatatgcccattcccagagctgggtgtcagggagtgtgatctgatatggtttggctgtgtccccacccaaatctcatcttgaattgtagttcccataattcctacatgttggaggagggacccagtaggagatatttgaatcatgggggcagtttcccccatactgttcttgtagtagtgaataagcctcacaagatgtgatggtttgataaggggtttcccctttcacttggctctcattctctcttgcctgccaccatgtaagatgtgtctttcaccttccaccatgattgtgaggcctccccagccacatggaactgagtccattaaacctctttttctttatcaattacccagtctcaagtatgtctttatcagcagcatgaaaatgaactaataaagatccaaagtgtgtgtgctgtgaacaggtgagaatggtaaaattgggttgcttttcagaagaagggggactgggtgctgggcagtatcccctttaaggactgacccaggatctggaagatgataccaacaatgaggaggaaaggctggggccagcagggccggggggtggcgtccatttgctggaaatgaccaaggggcagtgtagaaatgtttgggaaggggcagtcagccaaccgcagagccagacgccctgtacctctccccgcagccagcgaggctgcctgcttgtcactgtgaaagtgtgttgagtttctgcgagtcacccaggcagagttacgtggcccattgtgatgatttccctttttgcctcagctgccaggacgcagggagccaaactatcatatctaatctgttaccgtttccctaagcccggggatttgggagcttttctccccctccttctgtgtggtgttcttgatttttctctttctatttaacagcctttccagtttatgtgtcgtttatcgtaaaccacctcaaatccttttttgaagcaggcagggtataaattataaatagatttaattttaaaaattcaatagggcagtttctctgtagggctcccagcaatcgcttctgctgacatttccctcgttaccccaggggagcaggagcagggcggtgggagcagctgggaaggggcttaacccttggagtgctgtgtctgggggcttggccccatgtgctgggaccaggagcccagcacaggtggacgaccacgcagccctcagaggggtcgagctgctgaagaaagtggggtgatgtcccccaccttcctgggaattcattccttcccacggttgccccatgtcatggttcaacatgtgcccacttgagccggcctttccttgtccttctcttttgcaaaccatgcaggcctcacacctccacagtgccacagatgcagtccacacgccaggtcataaaaccctgcagaaatgatgccagagttgtggcccggtgcatcggcgagctctggggggctgctcacctttcacaggtccccagagatgtataaaatagctcactcttagtcactgagctatgaatgtaggccttgcacttgccagctcagagtctcaaagtgtggcagtggtggaggcacctgtgtggaggagccatggctgggccatcctggtgccaggcagtgtaagcaggttagggtgcaggtgccgagggaagtctgccctgctggcaatgcagtaggctgccctgggctgtgtgacctcaggcaagatacccaacctctctgaacttcagcttcctcatctctacagtgggtgtacagtaacacctacttaagagggttgttgattatttgagttattaaagcgtagcgaaaatgctcagaatcgtacctggcatattgtaagaacttcatctttgctatggttctgtacttttggggaacacacacacatacacacaccaatataaatcattttgacaatttcaactccttatccctggctcacccaagaagctcacatcattcaatggaggcaaggtcacaggaggtatgatccatccgcccatctgtccttcctcccttctccctccctcccttccttcctcccttccttccctcctcccttctatcctctctcctcctctctcccttcttccttccctcccttcctccctccctcctgtccctcctcccttccttccctcctcctttcttccctcctcctttcttccctctctcctccctccctccctcccttctttcttccttccttccttccttccttcctccctcccttctttccttccttccttccttccgagtgtttgttgagcacttactttgttcttggtatcaagggatacagtcgtgagcaaagacagatgtggtccctgctctcttggaggccacattccaggctttgtttaagtaaacaaatgaacaaaaagaatgtcagaaaatgaaagtgttaagaagaaaataaatgagcttgagaggctaggttgtgagggggtgggagtgctggttgagaaggccaccccaggcggggatgttggagcccaaatgacaagaaggagttagccagggaagctgagacacagccttccaggtagaggagtggccagtgccaaggccctgaggcaggaatgagttcggtggtttcaaggaacagaatggatgctggagtgagctgacccaggggtagagaagacggtggagaggtgggaaatgcaggcaggggccaaatcctgtggaatccagggagcctggtgaggagtttggactttattttaagtcattagagcagagaagactccagggctttctctctagcaacaaccctgccactcactaaggctcccaagctggttgaccagaaggatggactcaaggagggtagccctgggagggccacaagggtcagaagcccttggtggcctcacctctgtgacctctcaactgatttgggttgtgcaggggctgtcagggctgagcctccccaagcactcagttgtccggtgctgcggccgctgggctctgtccacagcttgaatgaatggctggtggatctagtgacgtcatttgtttatgctccatctgtacagaaagtttgtacttcattaaatttatgtatgccttagattttccaatgggagaagagttcttcttttcccacctgccccaagccagctatagaactctgcagcttcaagaaatggtgaattgattcatttgcttctaagagattgttttgcttctcctctgcgggggagtcaggcctggaggacacaagaaggaaggaagaggtcatcatttctgcctgtaaggcactcgcagtggagcagataatattagcataaaccgaaaagttaaaaataaaggagagcagattgtgtcgtccacaaaaatctgcgtgcctgtactgtggaatattccttccagaagtggttgatagaggctgaacagaagagggcttgtggccagatgagctggattaatcaaagtttgaaagctgcctgtcctgcaggacttgtcagagctttgacactgcccatgctccactcatgtctcaagtccctttagcacttccatgtctgttcccgggagctttcactcccaggctccagcacctgggtctctttgctaaaggctgctctcatgcttccagaattgatttcgtctgccaacatgatgagcaggaagtgtctggaaattcacatcccctgccttggggcagctttaaccaattaactagggaatgtgggtgtgagggtataaatacctcagctcccttgccctgatgggactgtttccagagtctgccacagtggtgggccaatgctaccctccatggaacttggtttgttacagccttcttgctcatcccccttcctctcccaggcccatttcccactccccttctggtcccttccataagggctgcctcccaaagcgctctcccaccattctcatctcagggcttgcttctggggactcaattatagacagtgatgcctcaggccaagtattaaatgcagctttaagcaaagttagacagctggctatgctgcaggacttgtcagagcattgattctacgtatgcatggtggtgctccaagaggaggtagtaggaggcggcatggtgtgcatagttatctgcccagagacagcagtcaccctggagcacctccagggaggatcaccccccacatccacacatagagcgtacttcggatactgtgctgcatggtgggctgtgggctggaactctgggaaaagcctctatggccaaggtcacagagagtaaatagaaagttggcatttggaattcagatgtgggtctttggactccaaagcccacaccatcaacaaccccacctccccgggtctggagtctgcagcagacacctccgtggctcccaatgtgcccatcacagccattcttgggacactgcacctatcagttcacttgtaagccaccagcctgggaggcatctgggtctccagtctttccatgcccagaccctaggccagtaggtgcttgctgagtgaggttggaaggtttgagggaccaagtactgcccctgggctgggctctggccgtgccccagtccacctctcccctcgggctgtaggcatggagaaggacctcttgctgaagccctcctgctcctcaccccatcctggacctccctgggcagctactctgagtgtgtgtggtgggatggtagggggaacggaggatctgggacaagcatcatttcactcccagttacattgtattatccaaattatccgtggtcattgacaacaacattgaaggtacagatcacaaatcaaaatcacccgaactccttgcacagcagccatgctcacgttcttggcttttgctacacaaatgggcacaacattccagcccccattcgctgagggctgtggctgtgtctccaccacagccctgaaagagggattcgggcaccaggaagagctaagcactcacccagctcacaaagttgggggccaggttggaaaccagacagtctcactccggaggtcgactccccctgcccagcttgtccccatgtttatttcagaaagtcttaaacatatgtaaaaggagatggagtcgtccgacgaggctccctgcaccagcacccatctgtgacagccatccatgcctgccatgccggggtcttctcagcccacatggtcaggagcccatcccagacctcacagcatttctctagaaaatagttcagtcagtgtctctcagaacgtgcactctgaagactctgctatcctggcccagataaataaaatctctctagaaaatctctctacgagaatgtaagctccatgagagctgtatcctcgagacataggacaggacagtgcctggtgcagaggagaggcacaataaatattttctgaatttccatctatctatctatcacctatccatcatctattatctatcatctatcaatcatctatctcctatctaccatctctctatcatttctctatctaccatctatctcctatctaccatctatctttctatctttctatcgtctatcagtcatttattatctatcatttatctatcaatcatctatcatctatctactctgtctaccatctatcattgacctatctaccatctatctatcatctatcaatcatctattatctatcatttatatatcaatcctctatctgttatctatgtactatctaccctttatctacctatcatttatctatctacctaccatctacctactgtcatccatctgtcacctatctttctatctctctatcatatgtcaataatctattatccaggccaggcgcagtggctcatgcctgtaatcccagcactttgggaggccgaggcaggcagatcacttgaggccaggagctcaagaccagcctgggcaacatggtgaaactccatctctactaaaaatacaaaaattagccaggcgtggtggcacatgcctgtaatcccagctactcaggaggctgaggcagaagaatcacttgaacccgggaggtggagcttgcagtgagccgagatcgtaccactgcactccagcctaagcgacagagtgagactccatctcaaaaaaataaataaataaaataaataaataataatctattatctatcttttcctatcatttatctgtcaattatctatcttctatacgctatctattttgtatgaaaatgagattcttctaaacctactgtttcatgactttctgctttcccctgacaatttattataatcactgttccttctcaataaatatgagcctcctatgccaccgttttaactgcctgcacagtattacattgtgtgaatgtattctcatttgtttgacctattttccttgggacgtttaagttgtttccaatttttcattattgtaaacaatgccgcagtgaatatccctgtttatgggcccttgggaatgtccacaatgatttctttagaaccaattcttggaagcagaagggctgggtcaaagattatgtgtctttaaaagatgtatttcatattttaaaaaacatttttgatggatcttcacgctgagtggtaactttcttcaaaaaacagtgacccccattggattgtttttaccttgaatcccgtttgagaaatagatgcagaaacagaagctgtggcagaggcgggtggcgagggtcctgttagctgatggctttgccctggcagcacagactgggcgggagcaccctcagcagcgatgtccagccttgtgatgggcacccctgtgattgttgtctagtgctcacatcgcaaccccactcagctccctcttgccgcctggagggccatcacccaccttttactttgaactttttggagtctctgtgttgccaaacagcccctctgttctgggtctcctgacttgtgtggtccctggactggggcaggacccaagtctttcctctctgggtcagctgtgggccatataccaagtggtataataagaccaggagcttctggaattgggcaacctggcatggagtctcaacattaccatgtactagctgtgatgcctcaggcaaattacttaacctctctgaacttcagggcacaattcccatatgccctaggactactggtagggtaggggaatgaggtccaaggcactccagaggcccttgctgcatggcagaacatctgtggagctaactgtagggctcagctctgagcgctttgtctacatgtgctcatcctgaggccaagggaaagcatttggggctctggggactggcgtcaaatcgccctccctgcccagagctgtaaactgtggagctggggatcctgtcctcctggtttgtaccatagccccagtgcctagcagatgctgaatacagagccagtgtgcaaaaagtgtctatgggacgagtgaatagatgaaaaactgcccaaagccctggggacaaacccttcaatctgacggtatctccctggagagacacgtgaggcctggctttgtctcacagtaacactggaagagaaatacagcaagaagggtccaagcctggtggaaaaaagggtgatttcttttttacaaaaagatgccagttgagactattgggacaagagagagaaagagagagagagagagagagagagagagagagagagagagagagagaagaggaatgagagagcaggtttctgggcagccagagaatcaacacagcctgcaagagagaatctgttcctcctgggttgctaggcaaagggctatggacagaatcgattggtctttgggagccggcagtgtttatgcagctcgaggctggagaggggcagaaatggcccgcagaggtgcccgaggcgtccatgggatgtcttcgtggaggtggaaagaaaagagagctgggcagaaatcctggctctcagcgtgggccatggggcaaggcacatcccttgccagtgcctccgtgtgctcagttgctgtggttactgttattggaaggaacacatcttcatctgtaaaatggggcagcgaccccggtgcccaacgcagggtgctcacagcacctgacatcttgatgctgagagcttagtaggcactttgcgggttttaattattgcactcccttcccccattccctccaaaagttattgactactgtgcaaacccagaccctggctttccatagtagctttcactaactatgtgtggaatgaatgagtgaatgaatatatgaatgaatgagttgtacccgtgccaggcagctgctggtcaccgcgttaagctggagcattaaacatgcattaaaaccaaaggcttggaactcaaagcaacttgcactcaaatcccaggtgggtcacttcactgctgtgtctcttcacccctgataccctcgtgtgggaaaaggggaagacactgccacccctcccaggctgggccgagaactgagatgttttgtaaagtgcttagccaagtgcccagcacagggcaaattatcaaaggctcaaaaacgaccatcagctgtgctgtggctgttgtcattatgggctaagaaggggctttggtggtggttcaggaaatgaagaaagggctgggcttctccggctgtgctatcatagccagcattcacacttcgtgctcatcaaggggcctttcttccacacctctgcgtgtctgtggttgtggaactccagcagccctctgaagtggggggctgcagggagtacacccattttacagacgaggacagagaggcttgcaagggaagtgctgtgctccagcctgcaataatcacttagcatagaacaacttgttcattcacccgacttgaattgtgcttctaccatgccctgggcttgcatcattccatcctcccaacagccactcgaggtaggtgctattatgagcctcatttgtacatgagaaactgagaccaaggccagcacaaccaggtggcctgattcagtgcttcatggccaggaggggctctccatgtactgtgcggggctggagagcaaggtgcaacttcctctctcactttccaaggcaccccactgtcagcctgcagccctccagacccccagaccctgctagtgtccacaggagtcagacagagatgccagacaggcccagaggcctgaagtggagactctagttggctgggtaatggaaccccagtgatgtccacaggtaacatctggagcctgtgaatgtgtcatcttacagggcaaaagaggctctcagatgtcatctgaatgttgagacagggatcatttggatgatctggtgggctcaatgccatgacaatgtgagggaggcaggaggtcggaatcagaaaagtagattctgtcagggttgacactgccgactctgaaggtggaggaaggggccagcagctgaggaatgcagggacctctggaagctgggaacggcaaggagatggattctcccctagagcgtccccaaggaaagtggccttgtggacatcttagttcacgatttctgacttccggaactgtcagaaaaggaatttgtactgctgtagcccattgagtttgtggaaatttgttacatcagcaagaggaaacgaatacaaactccatttgcaaaactaatactatgctgtgacaccacagggcacgttttccactatgctttcagggctgctggaggagcagtaggcgtgaggatacaaactgcggctacctgggctgagctggcatctctggggccatggtggagccaccgtcctgattcgagccctgtctgctggtttcatggcaccagccagcagctaacagcagcagaaactgcccgcagcaccaccttccaccctgtgcacttccagagtgacaaaggcatggcggctatgtgaaaaaggaggcagagaaaccagtgaagagcaagggtcttgcctagagctgctcaaagcttccctttgaagagccaggaggacaaacggggctgctggctggatggcactcattagcagtcagtgtgctgagaggggtggaccgtgatgaaatgagtgggccccggggtgagatgagggaagatggcacatcaggagatgagcccctgtccctgcagtcttctctgtccccctcactgtacctgcttttccacctttgcatccaccacagcatttagcttgcccactgcaaacgtcattctttcttgggcatgtcattgattttctagtgggattggtggtgcttcaaaccaattgtctctttgccccctggttaagcagacagaggacaggcttgggagccagggggacccgcattgtagtctcagctctgtcttctagttttgtggcttggagcaagcctctcagcctcactctggcagccgtgagccctccttgagggttactgggggagattcggtctcccgggtcatctggatgcaagcgaggccatgtttaccatggtgtccccagcacctggctcgtgggaagcaccttctagatgtttgctgaatgaaggaggcacaggggtaggtgcaggtcttagtacagtgccaggcacaaacccaactccggaccacagtgtgggaatgaagagacagctaaggtcccaccccctccacccttccagccttcttcctccttccagccttcttcttcacactggagaagcttgttcttgactgcctacatgttgacactttttagtagtctttcaaaattgtcatctccgtaataattttcgaaaaacatctttggaagttgggcctttgacatccaggaatgccatgtaggcgccttttatattctgtaacccgggggcatttcttatcttccctgccacctgggaagcttggcaaaaacagaggcactcaagtttgcctctgttcctgtgcggtgcttggctttgagaacctgtgttgatgcatgaatgatggatggatgaagaagggatggatggatggatggatggagtcaagatgtgtgtgataaatgaatgaatgaatggataggagatgaagagtgagctctggtcttttctgtagctcaaatggtcttggagaggttatgttccatggctggcattttctaaagcatattccgtggattagcagttctgccagacattcacaggtgttatctgagaaatgttaaaaagggactgggagcggggggcggtgcttcctgtggaataatttgggaaatgatggtgttcaacaaagttaaacaggtttccctctgacaggacttctcagagcctttactatgccaacatgctttgcaaattccccaaaggagtgtagattcggtcgttttctccagtatataaactatggggttcatatttcgaggatgggttcggcagatcaggctggtgggaaaactcttcctgggggaggttgttgtgaggaggaaggaaacttctcctggcagtggggtgcccgatgggaacagtgcaaagggctgtgctgcccatgcccaggctgctggctcagccccaggctggtcggcagcaggttctgggaaggacagccttgactttgtcctgaagcaggcaatctgcttgtcagacacactcggtgtcttgcaggagcgaggagtggtggtgttattgttgttgtcagtcagcaattctctgcttttattcagggagaacaaaacgacaccgccggcttttattttttcagctttcgcacccactggatccatgccacaggccatcgttcttccccagaaagtgcttgtcgagggttaatccataaggtcacttgaaaacgaagccattattcccttcttaaaggttaatgtgttttttccgggagtgtgtgagtggaaatttcaagtattccacattcttcatttagctgggtaaagtcctgagctcttctggaaaaatgagcccatggaaagcaagactgggagcctccagcaggagaaagcagggcagtgggggtggctgtgcccccctgcctcccagccaggtatgtcacggcctgcagaacgggaatcccagggggtctccgggagtttgccagccacgctggtcctctttgcaacctcctctacctccccactcccatgtctgtgcccttagttcgaaatggatcagaaggctgtgtctcaggccagacacggtggctcacacctgtaatcccagcacttggggaggccgaggtgggtggatcactttaggccaggagttcgagaccagcctggacaacatggcaaaactccgtctctactaaaactatagaagaaaattagccaggcatggtgggcgcgcctgcaatcccagctgctcgggagccttaggaaggagaatcgcttgaacctgggaggcggaggttgcagggagcctagatgataccattgcactccagcccgggcaacagagcaagactctgtcttaaaaaaaaaaaaaaaaaagaaagaaaaagaaaaaaaaggaagggctgtgtaccaactccacatgccacctcgggttgggcatctgcccctggtgcaaactaccttggtcagagggcagcattttatgtaccaccgctcttccatagaggaaagaggaaatggccctcagagatagggggactgagtcaggccaggaccccccaaacccccaaagtgagtctcccagtgccctacccaatctgccaggtatgcacatcttagctggagctacctctagattttcttcaccttcaatttgggacattcttttctgtttcagataagaggttagcaaactatggcccactggccaaatctggcctgcacctactttagtaaataaagttttattggcacccagccatgcccgttcatttacacattgcctatgtcggcttttatgttacactgacagacagttgcaacagagaacttctggcccacaaaaccagaaatatttactatttggcctttgaagaacaagtttgccaattcccactttagatgactattgtataatgcttacttagctcacggaactccttagtaaacatcaggtgtaatgatgattattattactatcattatccaagatggtctttgttcatttagcaaatacttactaagtgactgtgcctgccaggcctgtgctgagctctgggaataaaacggtaaataagatgaggtccctgccctcgcagagctctgaacactgagatggtagggtatgctttctcctacagatgatcagagcactcagtcccaggtgtttagcgcttggggatgtaggtatggggctggcagtgtggatttggtacacactaaagagtcaatgggatctctggctcaggaaacagagagtctgctgcggatgctggtacggactcgacagaaatgcctgggctccaaaatagccaagcacctggtagagagagggttgtggagggagggggtctgggggggtggttacagggagagatgaggttgaccagttggccaatgacctgagtcattcatcccagaagtctgcctggacaaggaggattttgcatactaccttgaatgccaacagaaaggaagggtgtcacccctacagcccaaggacatacccaagagagactcaagctggaggctgttgttttcaccctgcttccatcaaatttgtctgtggaatcgactgctctttttcccttcttctaattttatagaatgtatctggacacatgatcaccagaaataaagagcacacttcccaaccagccttgcagctagacgtgctcacatgtagatctgggccaatgtgatatgaatggaagtggtctgagccatttccaaatcatgctgttgaaagggaagaggcaagcccattccttgcccctttattctttcccacttgctggaatgcagatgtaatggtcggaactggagcagccattttgtatcttgaattggaagccgtgtgcatgagaaatggagaaatgaggtagaagggacccgggtctctgatgacggtagagctgccccaccggctctggactgtgaacttggacctttatgggagagagagaaatggatttctgtgctgtttcagccataatttttttaggactctctgttgtagcagccaaacctataaaatgagacacccccaaggcactccacataaacatacaaccgaaatgaaaacagtagggttgctatgcaagtaacgctccatagcctcttcctctgggaagttccggggctccattgctagtctctgttttctcagcctggtatgcagacagctttctctgacgaggagcccttctccatctcgccagctgctggcttcctcaccgcctctgagtcttcaatatacatttctggatggaggaagaattggagggaagcgggggggtgtgtggccagcaaggccgatggagactcccggtcctcagcagccccctgacctttgtcttggcctcccccgactggtggatgggggcagcctgcgaagagcccagggtcagctgtgccgagggccgctgggaacaaaagactgtaagggattgcagatgggcctgccacgatgtcagaataataattcatgtccccagttcatctggcctctgccgggcggggctgcatttctcagtgatctcagccttccccatcccagcccggttcccataagaatcacaggagtgctgccaattagaggcctgccatccgaggcccctctgaatgtaatcagccataataacttaatagccttaagtttgggaggcttcttttgaagctcagcgtcttcacccccggtagcccaactaatctggaaaagcgtctgtcttgcccttcccacaccaattatcttgtcggtcctgctctccagcactcgggaacccgtctcagaggggctgcctcactgtttaactgacaggcacggggcatacttcaggctccccagctctcattccagccagcatcccagcacagattcctgagagaaaacgaagtgcaaaatgcaaaaggcttggcttgagccacgtacaatcacacacgccaagagcaatcagagaaagtacccactgggtgccaaggatcgtttgaaaaggagaagatccatagtcagggagagcatttaatatgcaatacttcatgttggattaagtgtaccacgcagctgaaaaaggaggctatagctacaaaacaaatgttcagatgtcttcatgggtgacctccaagtttccaccggctcctaatccctctgtcataattcaagctcgttggcctggagttgacgacttggcgggtggaattccaggatctatcagcggctctctaaggctgccagtgcttccctctgtggagcccagcacactgatatgtttctttcgcaggatggaagcccatgtttccatttgtccaggcagaaaaccacctctgagctcatcttcccaagagctcaatccatgcaggaaggggatcggggagggaagcaggagggtctgtcacagggcaaatgctatgaacgcctctacttcggaaagaacgtatccttggggaacccagggcagggatcttttgagtgattttgtcagaaccagcctttagcagtggactatccatccatcgatctatcagcccacctactcatctctccattctttccttcattcattcattcattcaacattcaacaacctatctaccctcacccatgctgcaatcttaatagattattcagaggcatcgaaaacttatcatatcctaaataaaacttttggttttctcccagcatggtaggcagcctctaaactggctcccagccatgctggtaagtcacgtccttgtgcagtctccgcccctccagtgtgggctgggcctattgacttccacccaccccagtaggagatggcgaaaatgatgggaggccagtcctgagattaggttgcagcaaactctgacttctattttgctccttctctggcccttctcatgtactcactctgatgaagccagagaggcccatgtggcaagaagctgctgtctctggccaccagccagcgaggccctgaggccttcagtccaacagctcctgagaggcgatccatctctctattcatctctctctttctttctctctctcttccttttttccccatctctccatctctttatgtatctctatatctatctatctgcctatcttctatcaacctatcatctatctgcctgcctgtctgcctgcttatctatcatctatctgtctatctctatctgtcatctgtctgcctatctatctgcctatctatctatatgcctgcctatctattaatatctatctattcctctatctatatatcatctatctgtctgcctatctgcctgtgtatctatatgcctgcctatctatttatctattaacatctatctatctatctgcctttctatctgcctgcctatctatttgcctgtccatctatctatctatcttctatctgcctgcttctctatcattctatctatctatctatctgcctatctagctgcctgtccatctatctgcctgcctatttatctattaatatctatctgcctgcctatttatctattaatatctatctatctacctgcctatctagctgcctgtccatctatctgcctgcctatttatctattaatatctatctatctgcctgcctatttatctattaatgtctatctatctatctatctatctatctacctgcctatctagctgcctgtccgtctatctgcctgcctatttatctattaatatctatctatctgtctatctgatctatctagctattatctatctgcctgcctatctgcctgcttatctatctacctatctatctgtctgtctgtccgtccgtctgtctatctatctacctacctatctgcctatctatctggccttctgtgtgtctcagcttatggctgcaatgctccaatccctgtcttcatcttcacgtggccttctgtgtgtcttccccttttctgactctttcaaggacacttgtcagtgggtaatccaggatgatctcatctcagtctccttaaacaagtctcaaaaaccctttttccaagtaaggtcctattcaccagtttctgagacatgtcttttgggggccaccgttcaatccattgtacttcctctccactgtatttaacccttgggcctcccacaattcaagctacacctgggagtacccagtaagcatttgttgaatgaacccgtccattagttcagtggttctcagcttgcatcagaatatcctggagcgcttctaaaaacacagattagggccgggcatgatggctcatacctccaaccccagcactttggaaggccgaggcaggaggatcacttgaacctaggagtttgaggtcagcctgggcaacatagtgagaccccatctttaaaaaaataataataataaattaaaaataaaaataagaacacatactgccgtgtggatctccacactgagattctgacccagcaggtctggagtgacgcccgagaacatgtgttgctaaagggtttccaggaggagctgctactgctgctaggggaccaccttttgagcgcccctgctttaggtcacctggttttccagtcaaccatcagaggacccgagtcgtgatcagacttaacttcccccgcaaagagcgggtaggccccatgcatctccaggtgtccctggttcttctttgccaaggagacaaaacaatcggatgacctaattcttcacccaaagccttggtatctcaccccctccctgggggtcacagcagctaacacagctgtctggcagaaccgcagggtgaagtcacagccagcacctggtggacagcccactgctgtgcgtggaggcggagtcttcctggattctctcaggttgtaccttggaggccacacttgaggtgtgttacagagaccaagggctggtccaagtccaccccccaaaataaaatttctggttttgggggcacatgttccacagaggagaaaaatacaggaagagaataccttgaaaataacaccattaagacagatttttagccaggaagatacgtggcccattagggacgtctctcagtgcagcagacttgcctgggcctttacttagtgattcaatcttcagcccaacagggcctgggtgtcttttttttattctttcttttttaaaaaaaatagcttcaccgagttataattcataaattatacattttacccatttaagcatacgattcaatggtttttaatatatttacagatccatgcacctgtcatcacagtcaattttaatagactttcacttcaaaaggaaaccgtgtaacatttaactatcacagctctatcctcatgccccacacccagccctaaacagccactaagctaccttttgcctctaaagatttctgtgttctggactttgatatacatggaatcatgcaatatttgccttttgtgactggcttcttttatttagcagagtatttttgaagttcatgttgtagcaggtatcagtacattattcttttttatggctgaataattaatattccattgtctgctatactacgttttgtttatccatccatccgttgatggaaatttgggttgttttcagctatgataagtaatgatgctataaatgctcatgtacaagcttctgcttgaacgtatgttttcatttctcttgggtatatacctaagattggaattgctaggtcatgtggtagctctatgtttaatcatttgagaaactgctagactgttttccaaagcagctgcaccattttcaattcctaccagcagcgcaggagggctctaatttatccgtatcctctgagagccgatgcttgttgccattggactagattctagccgtgctagtgggtgtgacatggtgtctcattgtagttttgatttgcagttccctaaacaatggtgagcatcttttcctatgcttattggccatttatagatcttctttagagatatgtctattcagatcctctgctccttttaaaattggattgccttttttattattgggttgtacgagttatttatatgttctggatacaagtcttttatcagacatatcatttgcaaacagttcctcccatttactgtgtcatcttttcaatttcttaatagggtcctttgaagcacaaaaacttttagttttgaagaagtccagtttatctattttttattttattgctcatgcttttgatgtagtatctaagaatcctttgccaaacccaggttatgaagaattcctcctatgttttcccctaagagttttatagtcgtagctcctacatttagctctttgatctattttgaatcaacttcctgtacggcatgaggtaggaggttctacttcattcttctgcatgtggatgtccagttgttccattaccatttgctgaagagactattcttttcccccattgaatggttttgacactcttgtcaaatggcagattttttaaaggtcaagtttacggaggtataatttatctagattaaagttcaccctttttaggtgcatagttccaggaattgtgataaacacatgcaatcttgtgaccactgccacagtcaagatatagaacagtggcatcactccggaaagcgtcctctgcctctttggagtcaagctgcccctaaaatccctcagtccttggcccccagaaaccactggtctgttttctgtcctcctatttttgccttttccagcctggcatgtggtggatcatatggagctggaatcacacagtacttagccttttgagtctggcttctctcactcagcagaatgcacccgatatccatctgcatggtgcctgtatccgtaattttaataatgagcggtgttcattgcaaggatatatcacaatttgttgagggacattttgttgtttccagactggacaactacaaataaggccattacaaacattcacatgcaagtttttgtaaacgcgaattttcatttttcttgcgtgagtacctgtaagtgggatggccaggtcataaaatcaatatatggttaactttataggaagctgccaaactgctttccaaagcagctgcaccattttacatttgtaccggtaataaatgggaggcctggttgttctatatcctcatcagcactagctattgtcagatttaaattattttttctattctaataagtgtgtagatgtatctctgtatggttttaatttaagtttctcaaatgagtaatgatgtttagcatgtgtttattgtcgattcatatatcttttgtgaaatgctggttccaatcttttgcccattttcttcagttgtttttctgattcctgtgctgagagagctcctcctatattctgaatatatgtgttgttaggtatgtgtctggcaatcatttttttccaattgtgcattgtttattaagtatctgctactgcataacaaattgctcccaaacttaggtaattaaaatgatatacatttattatctcacacagtttctgtggaccaagagttcagaagcagctcagctaggtggtcccggcttggggtctctcatgagtttgcagttaaggtaccagccagggctgcagtcatctgagagcttgactaagttcagaggatctgccttcaaagtggctcattcatgtggtgctggtcactggcaggaggcttctgctcctttccacacgggcctctccagagcactgcttgagcacccttacgacatggctgctggcttccccctgagtgagcacctaaggcctctccagagcactgcttgagcgtccttacgacatggctgctggcttccccctgagtgagcacctaagagaaagccaggcctagccatgacctagcctcagaagtcacacatggtcatttctacaaaaacctgtttaggttaacacaggtcagccctattcaatctaggaggacattgtacaagggcatgaatgaacaataatatgtgagactatttgaagactgtcttggtaactggaaaccgtgtttgtattttcattttttcaacagtgtttttcgaagagcatcctgagtgaatttgattctcccttctcagcctcagtttctttaccttgaaatggggctgatgatcccatcttcaggcaggaatatttttcaaagcactttgtggaccacacagtccctcatctcccttctccttccaggctgtcatcagctccttgaaactatactctagcttctcccagactctaagacatccattttctcatgaattcatttgctgaaaacattcctggagcctgagctgttccagatgctaaatgctggtgattccacagcagacaaaagaaaattcctgctttcatggggcttcttgtgaggacaatgacactgggccaacacaaaaatgaaagttgatcagagcagcaccatagctcggatggcatccatggagcactgggcgctgggtttcatgtaatcctgtgacaatcctacagtgaagcaatgatcagctcctttttatggattttataaatgtccagaaagatgaagtgatgtgccagggtcatagaattagtccagggactgggactctgcactgtccgcctctagaacctgggggaagagagtcaactcctaaaattcctcagcaccaatgagggggctttggatgaggtggggtggctactggattgaagaggagaggggaccaactcatgagctctggcattgctcccaaaaagcccctcgggacccccatggcctcctccacccacacgcacacaaatcccggcagagctgctgaccccttggctcctggtcggggatgagccaagtttcacaagcaattatatttcatgcaagataaaactgcagaggagacgcttaattagattctttccgaaccttaggtttctttgaaatgaaacagccccagggctgtgagagttatgtgtatgtatgtattcccctgcccagaaagggctgctctccaaggctggaacgaaaacagagctgactgctgctccattccctgcaaaggtatctggactggctccggtgcagcccctagcccccctgctccccagctctgcccatccatctggccaacgcgggcgggaagcggtcccagtggggcagggtgagccgcttctcgctcggttgatgccaggtgttggagtctgagcccagatggccctggtctaccgggaaggcctgcctggggcaggggctccccccgggggtccaaccagcctgtgggcctcctccaccagcctgccctgtctgggcctcagtcttcccacctgtgaaagccggcagggaccctgggaggtgcagctggaatgtgagtttcctgaggggagggacctcacctgtgtttctaatgtgggagccatgaacttgaaatagggtcagcgtgcagtggactcacaaggacctgctcaatttgggctcctaaagggtatgagtccataggagagctcttgttcttcaggcatctgtgctacctggaaaaagagttgccaggataaatgcaggacacccagttaaattctaattgcaggtaaataatgagtaatcccttaatgtaagtatatcccaggaaatatttggaacatacttatgctaaaaagttattcattgttcactcggaattcaaatttaactgggtatcctgtgttttcatttgctaactccctacctggggaagttatcagctacccagagattcagggtcagtggaggcgaggtgaggcccgggcatgtgcatttttgtctcgtttcctggacatcctgatgctcagggtccttcatccacacttggagacacatgcagtgtctccttggggccaagctcaggagttgaggatgaatggaggagcaggtcttcccttcgcctccccagttaacacaacacgttccctgccttccctgtcagggccggggtgggtagcatggtggggccgctcagaaacatggtttaaagccctggggtgcagagtcaggcggtcctgggttcacatcccatcttctctactcagatctgagcaagttcttgagcctctctggccttcagtttcttatagagagatggaaacaggagcacttcccaggctgccacaaggctggatggaggccacagctggggactgctgagcacagtgcttctgtgaatcatgatgtcacggaaagacagtgacaacagcagcccttgctgcggcacatggagcatccctgtgtctggcgctgtcgcaaacactgcatttgctaagtgagctctctgcttgcctatgcttggagtcctcatcctgaccgggctcactctggcttccctcggcccctagcacagggtcctcaggctacacggcaattacagcactcctgccgacaaaagctgcctgcttaccaggatgggctgagcacgtgggccagacccaaggcaccctgcagacctgggacgaaacctggtcagtggcagggaagagagggggttccctatcccgccacccacctccctgccacatcctgcttccaggctcatatcccaggcccagaggacacaaggatgtcaccgggtggcagaacaaaggccaaagggaaaacgcaatcccaagcctgcagcgggcacccacactctccacccttcacctcccacatctccccatccgcaccccacatttgagccaaacaagggcttccaaggatgttaaaggacaaccctcaactagctggcagcaggtttggcgtgctcatgtcacgtgcaagtaaatgcgtctaagcggggacataagccacagtggaaggagcagaagacggagcatggtgagcaccacatgcgaattccaagccctcagttctgtcctgcctcccttcactctggcctggtctacgattacccctcctgccacaggctgtgggagctcccgtgcaaatgggagagggtccttaccaggaggataagggaagggttcatgaagaccccagaagaggaggagggggtcaggggacaaggatttatgggcatttagccaacaccatctgaaagagaggtgctaagtctcaggccatgatttctggtgggttctgttgtgaatcagttatttggtcagactcctttagggcctggtagattgtcacttaatgtttccatctcctgggtggtagttctccgacttccgctctcattccgctctcatttcagccttttgaaggcccgttgacaccccagagtccttcacaactacaagtacaaccctggtgtccttcacagctacaagtacaagtcatggggagcagaaccaaggattccaatctgatggagagtcacatttaccctttcaaacagataagcaggcatagagtgtattatacatcagtttcttgtgactttggttgatgtgagtccatccccccaaaaaagaccaataaattctggagcacctgtaagaccttattttttgcacctgaaaagatgtggtcctcctttgagggctttctttgggtggccaaactctcacccctcttgactttaggcaccaagctttgggctttatttcaaagagaattctgcatgtatctttgtaaataacatttgcatcatgctaagagtttgctaatgactttcatacatgattctgcatgtccttctgtgtaccctgttgacatttttgtattgaagtctaccttgcttgcaactatagcaaatgtcttgaacagttaatactattaggttgagccctaggaaattgtcactactggacttgtttgatctacataaaacagcagtttcctatggttcagccaataacaactaccatttccagggctctgatcacacaggcaggcccctagtagtatcattggcattattgttgtcatcgtccctgtgagtttcagagaggttgaacatctcactcaaggtcacacggcaacaaatacaggaatcatcacttgcacctggagggctccagggaggccctgggtcccgctggaccacatctttccacgtcgcactgtggccctgctgtttccccggccaggtcacctttgtctcttgcctgttgtatctcaacagcttcctggctggtcttggttcctctggttattctccactctgcagcgaagacacccactgcttaaaagtctcctgagggcctccgagggcctgagggaaaagcgcggctcagaccctggctcacagggtccccccttcttgcccgatgcgtgctacactcaggccatgctggatttcttttgagtttctctgcaagggcacggactggctcaccattcaagtggaatgatggggacagccatgcaaactgcaccagtagcctaagccattggctcagaaaatgccagctgagcacctcctatgtgcaggcacctgggtagacaaggagaaaatcagcaaagcccggtccttcccaaactctgtgcgagcacgggaggtgatcacccggtaaacaaaccccatcgtgtcacgtccacacaggtgccacgccaggaaagtagagcgaaggcagagagggaagagctggccagggaagcctctctggggaggtgacattggaacagagcagaaacatatccagaagacgatcatttcaggggatgggagcggtgagtgccgaggtcctagggcatgaacttgcaccctgagctgggggaactgcaaaggtccacaggccccaaagcaggggcttgagaggatgggagtgaggaccgagaggtggctgagctccattacaaaccacccatgggagatgtggcccttggcacagcagcagcacctggagacaccgaggcagcacctggaggctttaggacacagcgctgtccccatcatcatagggaagcttcctgggggatgtcccagccagggtccattaagggtctggcctcattcgctgtctgtctgtctgttcattcttcactccctcctagcttctgccccaggccctgcctcgtgggctgagactgctgcctggcacttcctgccccagctgaaggaaaccaggcagcccacacctgccattcgggtcgcatgtgtgggcctggggcccggggtcactgtcgggatgggctcagcaggtcctagcttgctgtgtggaaggcctggggccgcagaatgccccattgttcatcaggacgtggaggcccaggccagagatgccagctattttgggtgctgggcgaaggcctggatttacttgccacaagcgtttttctcagaaggaaggtcagtgggcccagcctgggaagtcaaccagtcccacctggctccgattctcccccgtgctctcaacgtcctctctgcaaaagacaggggccagggtgtctgtgcagtgccagtcgggaggtctgggtgtgtggtggggggcagtgactgtgttttccaactgcagaggccacagtgggcctcccagaagcacctaccacctccaatgagccccttccatttcagggagcccacctgtagacccccgatgcttgaaaaaccctgattaggaactcctgggctggtgcagcacctggcacatggagccaggtaatagagcacatacatacatcctatgttcagtccgcagccgggatcaagctgtctttccgaagcccgcacgagtgtcacagccgttccagaccgctctttgggtcaggggctcccgaaatcacctgcttctaggagcacgcacacacatgggcatggaggcatttggtttcagaaaggtcagaggccccagatcagatgattctggtgtaggtttgtggcctgcctaggctggaggactgacttcagcattaccaccaggacaggtggacttgggtggggccgcttcaccactgccgagccatgcaacctgggacaagccctggacctctctgaacctcaggctcatcacaaaacaggaatcatcatcctcctcacctatggagttgttgaggaatgaatgagttcatctgggcagagcatgcagtcccaacaggacggaatttgcttcccaagggggaaaaacatattttactctttacatttaaagcatggatacctgaacagtacctaaacagacacccagtatacctgtggcgttaaagtgtcatcggagagagctattaggaaaaaatgccttaaaagcctccttgcaggggtgaagaatggcaaaagcttacaaagatggttcctggaacacagcaggtgctcagcaaacttcagctgctttgctgttattactactcacagcaggtgtcacagaggaaggactggttgcaagcttgggtttaggagccatactgttggaggtcccttcctggctctgccacttgccagctgtgtgacattgggcaagttgcttgacttttctgtgcctcagtttctctcatctggaagcagagctaattagagcacctgtctcgtgcagttttgtgtagattagatgggttgatttgtgtggtatgtgtagttcagtgcctggcacacagtaaacactcagtaaatgcaagctatgattattattgattaagattgttaattatgacatgcaaggaacttgggggtcaatggtgctcattgaggggaaactgtaaggaagggtgaggttcaaggttggcccctaactgcttctcctgggcatctggtctggctctagcctcaaccactaagggctgtcctgggctccagaggaggggccgggtgccagcctagggcaggagcaccaaccgagcacgtgaagcactttgcacagtggcagggtgctcaggactctatggaacacccctatctgagcactgacttcagagcaacgtgtcctccatgcataacccagctccacatgcagggagcctgggccactgcggccagctgcccccttaccctctccatgcctgacctggctgaggtggggagggaggagtctatccccttcacacgacttcccagacggtgagcccctcgctttcctggtccggacccacagtgaagactcgctctcctgggatcccacggagaccttacgaggccccacgtggtccagcctgcccgcccatccctgctcatcagcccactggccacccactgctccagaacacagcaagcctgtcccgcctcaggaccttagcacaggccattccactgcctggaactctctccccgtggctggggccttctcagcctccaagtcccccagtcaaccgtcccctcccctgacaggccttcccagaccatccagggtgaagtggacgtcacacgccctcccctcccctccccaggtcttctcgtcatcatatccctgtttcatttttgtgttgctctaatcacgaacaaccattctctgtgtgcgtgtttcctgtccttctccccgtgaaagatgacaagctccatgggctgggggctttgtcttgcctgcttcctgcccgccacttcccagtccagggccccgccagccctcagtacctgcttgttgtggggatgaagcccaccgagaccttggctgcgctcgtcatttgctgcggttgccatcccattttacagctgtagacactgacagcagagattccttttgtgtcaatatctcagggaagtttctggaacccctacccaggacccagggaaaggactctgcctgggaggtttcagagggcacaggaatgcaacactgctcaggccctggcacttacatttctctgcaaggagcattttcctaaaatttgtctgttgcctctggacgcgtaagcaaggtgactaagggactcaggatttgattaggcagcaaatccggataaacaggacaggtggcactaatcagagctgacgactagacaaggcctgggaggccctcaggctctgtgagctcagagcacctctgtggaaacttccttctgcccggtccccagagaggatggccacagcagcaccctgcctggctgggacgtggctggatggggcacaggcctggagaccatgtggcatgcaccctgccactgagcccccaggtggaggtgccaggggagggaggtggggctgcacagggtttcttggctgtctccagccagtgggggacactgagcttgaactgggcaggtgacgacttctctgggcctcagtttccccctctctagaggtgatgagtacaggcctgggctcctggccctgaggtcctaggaaatgctctgtgctgcagacagtccatgaggccaggactggctctggcccagcctggtgtctcccagggcatggagggaacacacattcacttccagagagctggagcctggggcaggactcttgccaacagcccccggccagaacctgcaggcctccctcaggtcccacctggagccacctgcctgccatgccttcctggcctcgttcccccatggtaaaacagtcactgtgccagccttgggccaggctctgacctaagtgtgtgtttgtaaagcagtagcttcctttttgccttccaacaacccgcaagccaggaactgtcactggctctcgtgtcacaaacgtggtttgaggaacgcctgcaaggtctcatggttagaaagggcagagctggatttcggacccatgctggcttgagaggaagactccctccctccctccctccctccttccccccttttcctccctccctccctcttcctccctctctcttttctagtgaccagagctttcactgatcagctaacagtatttggctagctccccaggatctgctcctcaatcctaaatgggacagaagtcttggccaccaagcgtgcctgtgtcccccgccaggttgaggggcagagggtgccactgtggccccccgtgcctggcggaaagcacaccccggctgggttcttaaatccgtaaggtcacaatcaacaagtgaaggcaccctgaggacccaagggcagagagttccaggaggcggctgcgggaggggctgtctggggccccctcaggcccgcaggggtcagggcctgttgactctggcgtcctgtgaatagactcttgcaaagccgccatgttctctgcttccttggggaggcaccttgtcttcttaagtcattccgttgtgtcgataatgcctattctttccacggggccatctgccaaggtcaatgtttgtgttgttttaaaaacttacattgtatcactgtgggaacttgagtgtacagaaaccttttttttttttccttttaaggagggggctgggtgggaggtggaggtagaaaagttttctcacttttcctctattgctttaacataagacaccatttggatggcgttggcttcccgaagctccagatatttgaagctgtattcaccgcgtgtggtgcttgcttctccctccccaccctctgaggacacagccactggccattccctagtaaaaaaagaaaaaggaagagagggacagagggaagaagaggtgggagcttcctagagcacagaccctgattaatgttccagggagaaaggttagagatatgtactcaggaaagaaaatgggaaaaaggccaggtgcaatggctcatgcctgtaatcccagcacttggggaggctgaggcaggaggatcacttgagcccaggagttcgagaccagcctgggcaacatagtgagaccctgtgtatacaaaaaatacaaaaattctccagccgtggtggcatatgcctgtggtcctagctgcttgggaggctaaggcgaaaagattgcttgagctcgggaggttgaggctgcagctagctgagattgtgccactgcattccagcctgggcaacagatcaacatcctgcctcaaaaaaaaaaaaaaaaagaaaaaagaaaacagaaaaggaaaagaaaaagaaaaaaggtggtggggaaccatcttggaacgaaattcactccatgtttgtctgagcctgtctgtttctgcagaagggagagaggggtgattttaattgaaaaggacaaaattaaataaggcccggacttcaggtactcaggagcctcatggacttgtcccctggcacagtggctgccgctgccacctcatgccaattacgcggccggccaacaccatcagggtccccagattagatgccaggcccctgggcctgctttagtcttgggcaaaccaggaagctggccgccagcagcccacagccctgagatgccgggaatttgtttctccaaaaatgccctgatgaggccggtgaaaaggagggaaaggcctgacacgggccctggttctcccgggacacagtggcccaaggctgtgtcggccccagccccgggagaggtcaatggcaggagggtttgtgtggggatcagacatgaagctgggcaacagcagcagacaatgggtcctgaggctgggcccagacctcttaggccccatcagccacctcctccagggaggactctttgattaacactcactgggcccttctggctttggctggtatgagaggaaaccttccttccccactgcctcctgtccttccacaattcttcctagagcactggatgctgggggcccagagaccccaacacacaagtccctcagagtttgcagtctagtgggtagagagacgacgaatcaggctctcccagcagccctgagctagggaagaaaggacagagtgtcttgggggcaaagaatggggctaggggtcaacagggcccttctggggctggaggaaagataagcgggagtgagctaggcaaaaataggggtgcggtgctttagcacacgcaaagaacagggtgcctgtctccttaggggcatgagaggagggagctgcagcctcacggtggggtgggagatgctgctggcagcagagaacaggctgcttgggagccgccctgacatgacaggggcctcagagagccctaacttcagcagcccaaccctcacacatctgcctatacatccgcactggagcaggcagaggcttggcctgggagaggggctccggcagcagcagtagccccggcagcctgtgcacggagcctccctgggtcccggggtcactagtgaggctgctttgccctttcttcacagggtgacccacctgactgctcagggccgcacaagggcctccatgtgctcccgtctctagcaggtgaggctacacgggcggctcactgcctcacccatgcgtccctgggtgctccaatggcaccgaaggcagtagggatgctccgccactttggggtatatgcaacgtgcagccctgcagcccttcatcctcctccaccctggaggctcagtcagaagtgggcacatgcacctctgtcccgaggtgaggaagctgaggcacaggagtgcaaggggcaccccaaaagccaccaagctcctaagcagtacacctcggacctgagcccatgttgtttgggatttctgttggaggacaacttccatgagtctctgccactagctcactctgtgacttggggcagtgacttcagctctctgagcctcaccattcttgtctgtcaaatgaggctaatggctgtgcctcccctgtagagtcacagtggggagtagggggtgattggtatacgtaaggcatttgcaactgtgcctggcgcaggtgagcccctacctcgtcctcgcgtctcccctctggccccaggatcctcttcactgtgggcctagatccaagttgcctggcaccaggtccttgcatgagctcatgtttgtttagaaatgagagacacggaccatgtggttgtgtgtgccacctcagcagtatatgtgtcaatcaacaatgtgctgccaatcaccggagtgtcctccgggtgcaaggcgaagccattttgcttgcctttgttcactgtgacctcacaacagccatcgtcatttcaccaatgaagaaacagaggttttagtggcccagccattcagccagcgtctcacggccgttgggcaggggacccacagtcaagctgatcccagagtgtaccccccctccccactatcaccacccacagccccacaacggaccatggtgtgctttcctggtcatcatggacactatgtgtgtgtccgccgggcctgtggactccgagaatgcaggcagcacgaacccacgcctgggatccccactgtctgcagggtgcaaacggttcctcggcccaacaggccagggctgggctgctttgagggaagtacaggaaagagtagccaggacagctgtccacacgctcttcctctccttaatgtgtttcctctgaccaagagcagcgaggcaggtgggcagggagagctcaggttggtgcctgggcccaaccgtgacgctgtttttagaggaatgagtgtgaaatgctttccatgcaaaagggagagagaaagggggaaaggaccaggggagaggcagaagccactggctgagtataggacaccccagctcggagctggaggcagcatggcaccagtatggttggcacttctggggccatggaggcagggcaggggcccacggaatgctagatcttagagacctggcaaggaaagtggggtggaggcagatcaaggggctatgtttgggttcaggggccctaacccatcaaacggtgcaggtaacggcttccttgaagaggctgggtgagctgggaccaggaacatagctcaggtgaccttgtggggctgaggctggcacacagcagggtcaccacagccatgggcaaaaaaatgtgtgcaccttgtgctggaattctcgccatgctctgagctggtatgctgtcagacgtgggggtctgctccccaaaccctgctctgcttctcctctcccgaggtcatttggccaacagtgatggagcaacccagcatctctgattgctggtgttctttggaaggtttgaggaactgagaggtgtgggccagccatgcagatcagtgtgagagggaagaccctatcttgtccctctccagtccccgggcatgtcaggaagcactccctgaataggtgctgtgtaagtggaccgagggttcgctctctgcccagctgggagccaagtcctctctgtggagtatctcatttcatctcccacaaccacctcgagacagatctcgtggctgtgccatgaaggactcagggctcagagaggagcattgaggtcacaagacgaggaagtggctgagtccagacctgaacccaccattgtttctaacagctgcattgagatctaattcataggccatgcaattcacccattgcgatggctttcagtacatttacagagctgtgtaaccataatcagactatattttagagcattcacccccaaaagaaagcccattgcgttagcagtcaccccattctgcttctgccctcccctccagctcaaagccaacacaaatctattttctgtccctatggccttccctattctggacatttcatgtaaatggatttatacaatatgtgctcctttgtgtctggcttcttttacttagcataacatttccggggttcatccatgctgtggcctggatcaccgcttccttcctttttgtggctggatgataccctgtcatctggatgaaccatgtttgttggtgcgatgcatcagctgatgcacacttggactatttctacattttggctaggacgaatattgctgctatgaatacttgtctgcaagtttctgtgtgaacctatgtttccatttctcctgggaatgcacctaggagtggagtggaatagtacgtcatgtggtagctctgtgtttaactttttgaggagcagccagatccttttccaaagcagctgcaccttttatgttgccatcagcagtgaatgaaggttccaattgctctgtctccttgtcgacacttgttattgtctgtcttttttatttcagccatgggcatcacatggtctcttgtggttttgatttgtatttatttgttatgtttacaatattgctttccgtacatcagctgtgcttctctcaaggcggcaagagtcccccactgggtgggactttcaaggtttggatttgaagtctaagtgtatcagatcgtatctcctcttttcttgtcagcagtcactcaacacttacactcctaagcacctatggagtatctgcaccttcctcctcgtgaggtgagggttgaaggtgagagccaggagaggtcctcaccctcacagaacacacagaagccaacactgacacagggcacatactggaagaggcggaaacacacatggagtcagtgtccttttaggagggctctgaaagacaaaaagaattgcgtagaaagacagggaggcataagaagctcagcatgttttccttccttcacttcgtaagtgtgtattgatcactgattgtatgctaggcatcatgtccatcagcgggaggcccagaggtgggattgtgtgtactctctgccttccctctaggtaggtgggacctggtgaaggtaatcttattttcgagttggatagggtccctccagctgtgcaagcagcccctaaattgcaggacagcttgtgtctgtgacgattccatacaaaccacagagatgagaacaggtgatgtctgccactgacaggactctcagaagcagtcagcagcacctttgtggaccgtgcagtgggcttctaactgctcctgcatctcttttgtatggaatttcccctttggggctcagtcagttctgtccaaacagcaccaggctctatcgtgtgttaagatcttggtattttccatcttggtaatagaagcttctccactgttgagagaacagttccatgtagatgactgctcacctccctaccccaaccctcacgattagatttttgttcaatggggcttctagattccttacaacaaacactcttgtatgtggcaattattttgttcaaggtcttaagctctcctttggaggacaattcctgcccctgagagactcaggggtttggccaaagcatatggtctcatccatggtcaccatttgggtttctgccaagtgcccagctttacataaagtgtcactgtaatagctgcacgagtatctcccctcctcccttgccccctaccccgtcatctgctttctgtctttcaggcttcagctaatggcagatatgttttctggatacttacatacttgtttctgttcggactcttgagaaaaaaagtcagtttgttgattttgtgttggggatgtgaggaggttttttttttttttttttttctttcttaatctagatgtcttgaacaagtcagcaaagaaaaacagttccgcctttggaatgtatgaaaatgaagaccgttgcaggaggtcttgagccacagagctggctccagaggcattgggaggagaaacgcggcaggcctggctcactcattatatttcaagatctatcccagcttgtcacaacatggactgtgtaactgagacgattcgcggttggtgttcccatgctgaggcatgtgctgccccggcccttggttgctgcgcaatttgctctctatggactgtacctggggtgcctaccctggacttcagacaagcttcttcaagagtagcccctgccagagctggagccaacagcaagagcagcccagggccactctgcccaggctcagaggcatcactgggaaagaggcaggggcagaaggaactggggcgggaagccctgaagggtgtcgagtcccaggacaagggactggggtgtgtcccagcagacccccagggaagcagcagctttggactcgcctgacccaaccccttgctgccagacaggcttaaattgccccaactttccccatgaagctcggacaggaggacggaggagcaactgccttctggggtcagagtctgtccccgctcctgcaggccggaagcacgtgcggtcagcggtgggccagagcctctcagcctctcagcaagggccttcctgtagctctcggctcctccaacagccccatcccttagcacaggcggggctggcggagcactgcaggggccaggtgcagccaccgtgcagcaaggcacagctgcctgatcaaaccagatcaaaagccattcgatcatccaaggactattttcattcgatatttattgatttctaccactcgctggggctgtacagggccctgagcttgccgtgaggagcacatttcagcccccaccccctcggggctcacagtctggtagaggaagcacatgaaataaaagaatttgcacatgtaaatatctcattacaaatgcgcaagagccatgaaggaaaaaaaaagaacacgatgggaggtaatcacaaagtccacttattttagacaaagtggttggcgacagccacatttttgccaagacctaaaggatgggcaacagtaaaaataaaaatcatcatcatcgtaatagtaattttttgagtgtttcattgatggcgtggtaagcacttaatatacatcgactttgtatggactggcttatgtaatgctgaggagaactgtatgagtaagtattgtcattatctccattttgcagatgaggaaattgaggcacagagaggctcagggacttgcccgaggtctcgaggctggttgggagagccgagctagagctagtggtgagagtagcgttaagcattttcgcaagcaggggccatgccctgcatgatgctttgcagctggggaaatgaaggcacagaaatgccaagcctcctcctgggacagaaaccaaccctcagggcccctcaagccccagctggtgggaccctgcaaaggagccttctgcagtcctgtctgtgccctccacgctgcccaggatgaggctggggtgggagaagccgagcttcccaggcaggtccccagtgaggcccctggactcctgccttggggacggtggcacagagcctggtctagctggcagagctggccaccccaacatccttcaggctccatattgaagccaagacatttacaggggccactgaggacaactgtgctcccaaaccattgctatggaatgacacggcctctgtgcacacgttcctttggttggggacaatgaaatatgtcagcaagcaaatgggaatgcctaaatcctggagtcggggccagaagccctaggaaccccaccccacacagaaaccctgcccctgagctagagcgtcgcgtacacacacacacacacatacacacatgcacacacatatgtacacatacacacgcacacatacatacacacgcacacacgtgcacacacattcacatgcaggtgtccttcggtggtgggaagggatggccttgcaggtaccagcgtgtgctttacagccgcaatcaggtaagagctgtgggccttggggagacgcacaggcagctgctgcttgcgtctggtgggcgcagcctgactttaactcctgggcttccccgaatgctctccccatcagcccttcccgtctagtccctcaccacatggtcatggtccacatctcctcctccaggaactcttcactggcctctgtaccaacctcccccctcattggaggaggcgccatctgtgcatggcgtccactcagccatgtcattgccggtttctgtgtcattggtgtcttagctggacagtaagcagcgtgagggcaggatgctgtcacatcactgaacatttggcacttgacagatgcttaataaacatttagaatcaatcagtaaataagtgggtgtgttcatttgtcctcaccacagaactctcatctctcgctaacatagcattttgtagatgcccctcaaaaatcaagcccccctgaagtgcactgaattgtttctccccaaaagataggtccacctggattgtgacctaatttggaataagggtcgttgcagatgtcactaaggtaaggatctggagatgatatcatcctacattggggacggccctaaatccaatggcaggtgtccttttgagaagctaaaaaggaggagacatgaggagaaggccgtgtgaagactgaggcagagactgggggtgatgtgtctacgagccaaggaatgccaggatccccgcagccaacagacactgggagagagctgggagggacaggtccttccacaccgccttcagagggagtacggtctggacggcatcttcattttggacttcagtaaatttctgtggtttgaaactacgcaatttgtagcaatttggtgtggtaatcccagaaaattaacacaccctccttatggagtctagtacccccaccccaaggagctccatccaccaacacaaaccttaacgcttcatacccacatcttgaaatctgtccagatgaaatctagtctctaaatggggacgtagcctgtccccatctccccattgctctccactcacaagttcagcccatcttcccccagtccaccagtcaccatctctctgtcttttagagagcaggcctcccaggccctgctactaaagaagatggactctgttgttccaacagccctgcatccccttcttccggtggcagtgcgctggtttttctttagggaccacccttccccagctttcaacccatgatgtctgcgtgaagctcatgacccagagctgattagagcattctatcctctggccactagggctgacttagagatgggcacatgagccggtgagttaagaagatgcgatcatggctttgggaaggactgtagggaaacaagctttttctgtgggaaggccgactggggtggctgcaagtcgggacccatcatgatcccccatacagggggagcctgcctaggaatgaagccaatgtggaggaaaccagagctcagagtagagaaagacctagattcctggtggcagctctgatgttcctgggtctcgccatgcctgaaatccaccctatcaccacagatatgcactttcatgagccagtaaagtcccagtttttcctggggccacactgaagtggatttctgctcttgacaaccaaaagagcattgtcagtacaagaagacacccttctcctccacccggaggttaacaaaaaacctctgagtggttcttcctgctcagtgctggtcacctctggctgaaggccactccccagctctcagatccctgctgaccaccctccctgaactgttggcagcagtaacgagaaagctgaacggttgtttatcattgtcaacccttcctccacattacccctatggttttcttcccccaaacccaagccttctgtgcctcccacgcccaccccacttggtgccagctcggtggctcacttgttgtctggagtgtaactcatctgtgtacctgtggtctctactcccagcctctgggtctacaaagaggaggattgtgcagctcagactgagcagctcagactgtgcatccagcagacggttgtcggaagcacagctcagtgactgatcctgaccacaggggccagagccaacgctgtgtgctgtggtgtgtccagctgcgatcagcacttcacatggaggctcatcctaggaaggggcattcacagtctccacgtctcacagatgaggagtcaaggcagacagagctgcacagccgcacgtccgtggtcacatcgctggttggcagggctggggtaggatgaccttggtcccaaaacccatgtgcttaaccaggaaggaaaggaggaaggcatggggagagggagagaagaaaagaaggaaggaaggaatgatgatggaaggaaggaaagagggagggggctgtgtaggcatatgagaatgtgtgtatagtaagtgtggatgtagatgtgggtgtgtatgcacatgtgtgtgaatgtggatgtgaacatgagtgtgtatgagggtgcatggaggtgggtgtgaaccctgtgcatatgagtgtgtgcattcaagggtgtgtttgtgaatgtggatgtgaatgtgtgtatgagtgtgtgtgatgtgtgtatatgggtgggtgtaagtgtgtgtgaactgtgtgtaatgcgtgtgcattggagggggtgtgtgcacatgtgtatgagtgtgtgagatagtgtgtgatgtgtgtatactgtgtgcacgtgtgtgtgtattggagggtgtgtgtgcatgtgtgtatgtaccagtgcgtgggatagtgtgtgaagtgtgtgtgaactgtgtgcatgagtgtgtgcattggagggtgtgtgtgtgcacctgtgtacaagtgagtgtgatagtgtgtgtgaagtgtgtgtgaaccatgcgcatgagtatgtacattggagggtgtgtgtgcacatgtgtgtacgagtgtgtgtgatagcgtgtgatgtgtgtgtatactgtgtgcacatgcatgtgtgcactggaaagtgtgtgtgtgcacctgtgtacgagtgtgtgtgatagcgtgtgattgtgtgaactgtgtgcacacacgtgtgtgcatttggggggtgtgtgccctcccgtgccctctgcctgagcgccccatcctccatgtactctgtcctgctggggtctcattagtgtgcggagggcgtcagagctggccagagccgcagagccgctgactcacgcagtgtctggagtgagtcactggctgagccggaggctgcgggggccgcactcagccggaatccctgctggcctcctgttctcatccgcccgctctgagtcacccacacctatgcttcgggccgttgtggaattaaactctcctctccttgaggacgatgggaaagggattgaagagccagtggacgctgtgcccagctggaacccgggggtccgagggcagacagatgtgctcccagcactgctcttctcagaagctccgtgggctgtgggccaggctcgaaccatttccagtccatgtctctggggtgtcccccagatgcgggcagtggggcctctctggccttgcttgaggcctgagactctgggaggctcttcatgggaaaagttgcccccatccccaccaggggcagccaccctccacaatgggttgctcttctgggcatggtccagaagcttctagagagaaaatggcagcaccaacccccgacctcatgaagctgacggtccagggggagggcagacagcaaacagaaacagacaaataagaagaagcagagccgacatcaaggggccgtgcttcatgtgttttcagagctactaggactgcctggaatgaccatccacgcttatttgtgtactgaatcaaaccccatatggtcagagccatgctgatcttgctgcgtctctgtgttgagtacagggcttgcatacagtaagcactcagcagatgcatgctgagtgaaggctcgtgtgaacagcaaggcagaaaagtaggtgcaatggtgcaagaaagagcaactgggagagctgctgaaagagggcatctgagcagagggagcagcccgagccgaggccctggggcaggaacgtgcttccatattctagggaggtcggcagggctggagagcagggggaggcggtgagaggtgcgcttgcagagatgaacctgtaggctgtgatcgggagggtggatcttgattctctcctcctgatgggttgttcttctagatgcggcccagaagcttctagaggaagatgtcatggagcaccagccccagactcttgtccatcctcagaaagcaggaaggtgtgattccacgtgcatgcctgttatctgtcagctggtgttaacgtgcccaccagcaggatggaggccggctcggaaaagaagagcaagtttggaaacatccttgagggccagggagctgggaagagcatggtaaacgtgagtcctctgctcttggctgagcccagaccagacttacatctccatcattaggggcctcctttggagacgagagagcaggcagaaagcctgccctgttgaaaatggacctatgttttctagaagaaatagtagcagcataatgactctttagtgtaggtaaaaatgtgttgccaacacttagcaagagactaggcacccagtgacacgggagaggtaggtttggatgagacacagctcagaattgtccagatcacagattgtttgggaagtggcctagtggctgtgagccttaagggtgacagcggagagggcccctaagttgcacgtctcagtgtgacccaaggcaggcccaccttcctgggtggcgtgacctgccctgccctccccctctgcagcccggcctcactggcttcccctcagccggtgtccctgcatttttctatcactgctgggacacggtttccccacccttcccacatgctttacagatgttggcaccagcctgtatccctggccacctggcagtcattggacctattaaactggagttcacatgcaacacagtggtgcttggctggggtccctccctccctctgcctgctccaccggactgtgagctctgagtgcagatgtacttcctgtctctggaaacccagcacctggaacagtatctggtgcaatgtacgaggtcaataaatagctgccaagatggggataggtgatcccattttatggatgaggaaagtgaggccatgtgggcagagccctgtgttccttctctcccactcaagtgagatgcccagggtactaatttaagggggcgctcaccttcagagtccaaccctgtgccagcaccccttgtgagtgagtgccaccttaaatatgataccttgcttgcctcgcccttgtcccaccccagagaggaaggaagtgaagggcagagggacagtggccaggcagccgctagcccagggggctctccacccaactccggaagtacccaggctgccctaaaagtcctgagatgagctcactctgttcatcacatccagatgccactgtgcagggagcaatcaagtcagccatttcccccaataagcttgacttcaggggactggaggagctatttgtagcacttttaaaaccttttatagatcagtgtgttaccactgatgacagtggaagaaatgctgctattagaggcaggagctttaagaggtttgggtattggctatttctgattgggaatgccatgctgggaatcaatgctccatgcgtccttgcagtgctgcgtgaggaggccacacgttggcttgagcctccctgccatgcacgctccccttggcttggtaccccccttgactgagaacttggggtgattttctcctctgtagccaagccagagccccccaggctcccagctcaaggctgaccgaagcttggtgttaggtccgggtttcttgggggtgcatgagctgctggcgcgtccgcagtcggaggctgctttgtctctctcgctgtgtcttttcctcttgactctcttgttctcactccctcctgctgtgtctttgcccttgtgtctgctctccctcatcttctttctctttcttttgttctttcttctcctccttgcctctctttttcttcctttccttcctcttcacagagtccaagaaattctaaggaaatgagaagtgtgggctcataggtttctcaccttgaccatcctggctcatgctgagaactgggctccttcaaaaggcctgttgcatctgtggaagtggctcttctggaagagtctgtggcacccatggacaacagcagagtgcggccctctgagaccatgagactcatgtgattcctaattccactaaacactatgggttgggtgccagctacctgccagggggtccttttcttggaaggaagccagacacagctccaggagactgtagtgcaagatggaggagggcaaagccagtggaggagctgaagaatgacacccagttccagttgagtgaaccaagatggctccaggtggggttggccttggagtgggccaggacaattgagtgggggaggtgctcatgggtatggcagtggtgacggggcagagaaagtcatttgaggaggaggtgaaaaagggaagtggataagaagatttagtcttgggttcagatcttggtttcacagctttctggccatgtggccttgctcaagccgcttccacttctggaccctgttttctggcaagtgaaaggggacctaccttgcaaaggaatggcataagatgacgtttgttgtgtgtttgtcccctgcctggcgtatcctcagaatgtggtttgtgatatctttatgaacttgccaacagaggcaacctgtgcatgcgacatcgctgggcgtgcagaaaagcctagaaagctaatcctagaagcttttgctaatgagcacttactgtgtgctaatgagcacttatatgacttatatgtgccaggcagcattctacaagccgtgggtgtcctgccactcagtgctcatgacaaggactcaatgggaaggattcaccaccatgatgcccacatggctgaagaagtggatcccctgaagggaaagcggccacccagcagcccctggagccggcgtcctactgggcatgtcagctctggaaccatgctcctctcactgtggtttttgcttccctattgaagggctttgggggccagatgaggggtttgggctctatcctggcaggaggggagaaggggtgggcagcctctgaaagtgtctgtggagaccaggtccagtctcattactggtggccagtggggcaaagggccttgggggctgtggagcagccactattgctcctgtttctaggaacttctctctctctccccaacctcatcactgaggagcatcctgtctagggtttctggaaggctctcttcttacttccttccagcctcatgtcctgatggcgttgtgtgccaggggactcacggaatattgttttcctctaacgactcagacaactgatgaaatacttggtgccttgttctccctaagacctgtcctcccaagggcctgctttcacatggctgccagggccttcaatgccgagtccgtgttcctcggggaccatcaacatgtggaacttatttttaatttaaaagaacaacagactccccaaccccattcccctcccccgcttgcctcccactgctgctcctggctatgcggtaaacaccaggctcttgctacctctcagctttgccatcgtgtccagcctggaaattcttgctgggccattttcaggggccaagccaaggtcctggccagaccaaggaagcccataggcacttcagccttccccatctctgccccctgcatccctctgacttctaggcaagctgacccatgccactcccttctctagcagctgtcctctgcctgtccttgggagggctgtgggaaagaacaccatggcccaaatctttagatggtttggacaaaaattagaggggattcagtcgaagagtacctgctgtcccagcaaggctgaagcctcccagagtgtgagggtctcatcctgcagacaccaccccactcatggctgctcctgtccagaccctgggatgcactgtttgactttgtcctcatctcaagcccactttacttgtggagaaactgagacaaagaggctgagtaactcgtccgaagtccagtggtataggccggacttgacccgaattctgaccccaaagcctggcccttgactgccccctagcactgcactggccaggattccatggtggccactttctaatactgcatcacagcgcggggaggggctccaggatcacttacttgctcttaaccctggcgacaaggatgtgcttttgcagatgttggtttgttcatgagaaattcgagtcagatttgagggggaaagaggaaaagagagacacagtgtgtgtagagccattatgtctaattcagccaccaacacacttctctgtgggcctcttctggctccagaagcccccttcccagctgtgatgtcaccagccagcctctgcagatgacagccctgtgatttatcatcagccacctgctttctcactgctggggacagccagagcccagagcagcccccactgggctgggcagcagctgccccctgccccattgccgcacttccaggcctatgagctttttgagattgtttgcattttgggaaatgccagtcatctctcccaaatctgcagatagcagcatctcaccatccagggttggagtttctaaacagtcagataaccttgctcacagagaaacagcctgaacaccatttacagatagcgacaggatttaatgagataaagccttgggcatccatgaaccaatttttacgagccgtgatgaaatggctgttttcttaatagatacccaaacagaacacaattcagggctctgagagcttcaaaggaacttctcagctctagcctcttgaaatttcgggcaaaatccaaacacgtatcagtcttaccaccaccatgaaaatgatatgtttttgtaaaattatgtgggacctatctatctgccaagggagagatggcccagatgcttttgggactccaagccagtgtcttcagccttttctcacatgatgtgaacaccaaattccagtgccactttctagaggggagattgcagatggaaggcttgtcctggagaggttgaaacagtgggaaaggaaataaagagcatgctctcgctcttcctccaattccctgaactagctggtttcctgaagactccagtgtgggtagactgtggcaagtgggtgactgaatactgacctagtccttaaaaagaaaaaacggtcaaagggcacccttccaacccccactgtgtgacaatgacctcctcagagagcagccttatgggccccctttgaaagggcacagtgacccccctggtgtctgtctgttctgccctgcttggagaaacggcttcctcctctgagttcctaaaacatttatcatccctatgatttgccaggcaattagtcatgccctgccttgagtatctcttctattgttgtatcaaacggctgtttaacccttatcagcagtgcagttttcaatatcttgtctttctaactcgatgtgagcttccagagggctgtgcaaatgtccacccatgtccgtctcctgtgcccatggtccgtacacgtctggtcatcaccgtcagagggtaggactgtgtcctgcctttacaggtaaagtgtttagcatgcaaaatgcttagcacagacactggcacctcacaagggcccaagaaagagccactagtgtttaccttgttattcatattattatctggtatacaagaatagctagtgagcaccctccatgtgtgggacactgtgcctggtgctgctgaagccacttgaaaatggtacctgtgaatttccccaaagccatctggaatcaagctggaaactctagctctgtttcctactgaagggagacacgtatcccctcagtgagaagtcttttcttcaaaggcccttggtcggtgtcaaggatccttcgagtctaggtgaagttggttggtttggtctccagagcggtgtgtgaatacaaatacaaataccgtattcacagaatagaggatttgtaggtggagatccttgtcaacctctcccccaaagtagtcagagaaatgccagaagagaaggagctctccaaaggggagtgggctgggctgggggagctcagagcaaaccgtacccatcatggctggaactcactcgtgtcccagctactcctctcactggctaaggaataaggtgagacagtacagaaggttgaggtcggagagctgggtggatttagggagatacagagatggaaactttgctgtggtcacgtcaagtcagacgatctgatataacttcatccacatcagcctccaccttctttataaaagctccctctggttcctgtgtggagaatgtttaggggtacaggagggaacccagaagtccagtggggggccttcacagtggcccagatgacctggattggaccagggaggtgggggtgggcagggcaaaggagagcaagaaaagccaggaccttctgaagccttcctcctggccccctggaccccagctcagggtctctccactccctccactccccttgtccccagtcctcctcaccctgtatcagggcttcctgttagcatgtttttggcctcatggatggggggctccatgagggcagagccttggtttacttgtccctgctcactgaccctaacaggaagaaaaggaggcctggtcttgcgtaccctccaggctgagctcctcacagtccctgcatctgaggcctgtgacagtcaggcctggaatgagaggagaaggctgatctcccaggctgtcaattgttccattctaacccaagcattctgacccatgctgcattcccgcctggggtttatgactctctttgagtccactctgcagcccacttcccagcaaagcctggtttgagggcagctgagaccagccccaggccccaggagaaaggagacctacatctccccagaagaccccagccccgtggacaatggatcctctgtcagcctgcagcaaatgttacaaggccctaaagacactctctggccctagtgagactttaagaaacaaaacaaatttttaaaacacacatacacagcaaaatacaaagcgaaaattgatgatggtgatggagacgatagaatccaaggtgaccttatcttcaccgggccccaaaagaaaagaaatgcaatgtgtggcctctctaaagctattccggaaagtgagggggcgcaagtagaccccactgagaaggagctccatgccaaggaggagcagggctggaggcgtgaggaccaccaggaggacttgaacagcagcagtctggctgcccatgctggcctctcttctggggtcctctgggcctgcgggaagtcctgggtacccagggacatctgcccatagccagccaacgccctgatgaccctgggagtccctccaaattccatgtccactggaacctcagagtgagcttatttggaaataagttctttgccgatgtcattagtaaaggatcttgaggcgcaatcatcctggttttagggtaggccctaaatgcaatgatggtgtccttctgagaacagaggaggacagaagacacatagggaagagggccatgtgaggacaaagcagcgatgggagtgatgcggccagaagccagggaataccaggaaccagcaccatccagaaaaggccagaaggatcctcacctagagcttttggagggaacgtggtcacaccttgatttcagacttctggtttctagaactgggcctgggccaagtgaatacattgatgtgtatgtttttccatgtcaaggatacatgatttgtggatgattttctagccaccagccagtgggttggccacaccagtccttgcctcccgtgcttacctagggaaagcggagcccccactgattggggtcgggggagatgcagaagtaacttcgcagaggaccgatgagctcatgccggggacacaagttgctgtgcggctttccacaggggaagagttatgggcaacttcagagcagcaaccaggattcggtaaaatacttttaacgcaaagtactgctctatagtgacctgagagccctggccttgtggccggtacttcccgtggagaccactgcaggtgcactcattcttcattctttggacaaatatttgtggaggacctaaatacgcctaacactagatattaggcccaccatggtgagcaggccaggctggctcacatcctagtagaagagacacatatgaaggaaatgaacaaggtaccaggacagagacttacaggagagagtgtggctggaaggcttctctgaggaagggacttggggacttgaaggacaggaaggagccagccatcaaatgagctacggtaagaccattcctggccgaggcagccagagaacagagtccttgaggtggggaagggcttggccagttctaggcatgcgcccaaggccactttggctggaaaacggtaaggtctggaaggctccggtaaggagtaggaatttggcactgtctcacctaggagaggggaaactgctaacgcaatggcacatcaccacctccaggaagtctttcagggttgcctttgtggaggtgagccgccataccacagaaagcctgggcctactgtcatggtctcaactggccgtcatcatctgtgactttgcctcttaagattctttgtattatgaggggtgggtgtcttcccaaaggcctctaattctctcaccgccactgctgtaatgacctcctaaaggtctctaatactcagaatagcagaatagggtgacatgtgggtgattgctctgtgatgtcttttacaccattgatcaccaggatccctgtggcacatctggctagtcaagtgggtggccccttacctcccagagccatatcacagaaagcccttcccaaggaggagcagcccagagctctctgtcaaccagcattctgaagcgccacatgtggtgatggtttagcagtgtctgctaggagcatgggaggggagggtggggttaggtgtgccatgcatttgccctccttcctaaaagaacctccttcccctccccaaagccccatatactttctaggtcttaacccagtggcatatacatgatagatgttcaaaacatgtgctgtttgatcgatagtgtattcagcagtcatttcgcagcctagtgactgcgagctcgactcagagagggagtgacagtgacggggcagaagcacgtggctgccagatgggcgatgggaaatgttccgcacacagaagtcaaccatcctgccaatttgggaacacgaagtcactcgttcgatgcctgtcaagtccctatgctgtgcctgccacggcccttgctgctacggtaccacgagcgtccccaggaagacaccttgcttgtctctaattccatgaactttttgcaagaaaatcttgcttgccttccccaggggtcaggtcttcagaggggagactcctgccctggtgtgcccggctcctgcccatccagcagagcaggaaaaggtgactcgggttccatttgacaaacgtctcttctgaaagctgcccttagcaggcaggagaaaagcccccatttactggggccttgtcagagtttctagagcttaaattctcttcttcagaaaggaaaaatatctgcggccccacatccgcagatgcataaacgtgggcgtgatttatgagtgcacgtggtatccagcgctttcccccagctactgtgaaatcgttcctcttctctgactgagacgtcaacagtatggtcactgtatatgttttcccactttttccagagccaagaaccaggaaaaaaaaatgaaaaatgaaagtgtacaggaagtcaaggtcaggccatacccaccacagttcgggcagccatagaggagagctttcttaacggtccgctgggacccaagtgggcctcccctgggactgcgtgctcccctacagaacctgatggctggaaacactcacactactgcctgtcccggcatctctccctccgccgcaggggctgatgctgccacaggacacagagcagcaggccccagaggcttctctgcacctctgctgcctttctgagtaatcagaggaggccacacccactccaggacacccacacgggccttctgggcgatgacgctcctggcccaggagtggggggctgcctcacacctgctgctgtggggcagagtctctcctgggtcggggcctcgctggcggatctgctccatgtcgtgtgatgtgctgcagccccgcgtcaccgagagcctcttatgggccaccaagtccacacagccactggccatggggcaccctgcagggcctctggacacggagacctgtggttctcagccagtggtgattttgtgtccagggaacacctggccaagtctgggttcaattttgtttgtcacagtttaaggttggggtgtcactagacatcctacagtgcacaggacggccccacagcagaccagcccgactgtcagcagcaccgagccgggaaagcctggtctggagccgtttctctctagggtccctgctagggaacccctcactgccatggagaacccctctcctcctgtctctcaggactctccgagggtcaaggatggatgcctccccatcgagggccaaacaaactgacaaatcgagtgggcaaacggcttactcaaaggccaggagcagctacccgatgactgctccctcgacctctctcttctcactttcttccctattccatcctttgatgggtggcctgttacacgtttggaaataaaaacaagtgggaaagagtgccataaacattcctgggaaaaaagcagggccgactggaggtccattgttgctgagagacaaaaaagatcaaaggggaagaaagaaaggatggagggaggggaagaagagagggagaaaaggaaggaaagaaggaggaaaaggaagaagtaaaggaggcaggaagggaaagaaggaaggaagagagagagagagggagggagggaggggggaaggaaggaagggaaggaaggaaaggagggagggaaggaagggaagcagagagggaggggagggaggaaggaaggagggagggagggaaaaagaaatgaaggaaggaaggagggagggagagagggagcacagagagagggagggaagaaggaaggaaggaagaaaaagagagagagaaagggagggagggggaagggagggaggaggagagggagggagggaggaaggaagggagggagggagggagcacagagagagggagggaagaaggaaggaaggaaggaagggggggaggaaggaaggaagggagggagggaaggaagcagggttctcactggtaaatctccctggctgccctctgtgcgtgtgttacagagagatgttctgtagaaatttcaggagaagggctttggaatcctttcatcgcaagtggtatcaagcacaggtgaccatcaggatgtacggatgagacggcccagttggtgggagctcaccagactgacattaaaaggaaaggccaccccaaacctccatagcagtagctgggaaggcctgaatggctgtgtctggcctggaggaactgctcccttcaggaaccgtagcccttcaggggcctgaagcatttcagagacgaagagggagcccctgagacgcccacatgtagacactccaggaaacagcagtacctgactacactcaacaaacccgaagtcctcacggcctggcaggctcttcacctctggcgcctgccacactccagcctcacggctttccctcccctccctgctcttcccactccctgtgacactcttccctgcgacagcttcatggcttactactggtctctgcatcaatgtcacctcctcctgaaagccttccctgatcacccttggtgtgtgtctcctgtctgtcacagggcagggaacttgtgtctggctgccagtggcatccccagcagccagatccctgcctggcaatagtagctgctctgtcaatatctgtccatggttgagtccagctcctattcctcgcagctctgtgaggtccccaaggacttggttacaaggtgctctcagctgagtggccttaactaagattatcatgggtgatgctggtaggtttcccccaaatcgacatgactgagtggccaggaggtgggcactgagccagattgacctgagttccatcttggctctgcctctccatgacctcaggtcacccgagctctctgaaacggcttctttgtctgtaaaagagagagctgagtgagacagaccattttcggtgttgagcacagaagaaactgcggcatcctgcctccccactaggggaagcccagttaggccggttcttgaaaaactggatgcttcgtcagcctgagccaagagcctgggaatgcttctttcctcgtaggtcattggggaccaccaaattcttccaccctccatgtgcctctcattttaaaagacccaaaagctgtgaaaaagcggctccctgcgtatgggaaacgcatcccaaagcagccttgtttcgccttcggacatgggtggccccttctgcccaccccttcccaaggctgaagattgcctgttggagcttcctgcgttgaaaacaaaaatcttcagttccattgccattgccattggcccagccctgctggttgggacctggagggctggactaaggaaagcaaggggacaccagccaggctgaggcccgcctccagggtacatagagatgctgccccatcctcactcccggatgttctacgggccttctgcaaccacccctatcccggcagaaatgcctatcggttctccattctgatctgcgccagctcagcctccgcagagtgagggaaattagcatggccaggggctctctcctgtcactccagatccatctgttgcctccaaagtttccctaggacgagggccgctggccaaggctgacaggtctgagaagagcagccctcatttcacactgagctgcaccctgagcctcagccctgccaccagcacgccagcctccctgctctaacttcaagcccaagtgcccttggcaggggtgccatcctgcctgctgtgggcctgcgtgctgtccaaacagcctgggcacccgagattgtctcgccggccaatcacagcaagtgtggagcccgcggccgttccctgcgcacagtagtccctgcctcgtgcccaccgtaaagactgcctttatcactcgggaggttcattcattcatttactattcatttattctttcattcactcagcaaatatttacaaagccctcactccgcgtgaggacagtacagacatgaattaagtacacatggttccacggttcttagtggttccgaccaggagataaggaaatccttgtttgccgtctgtagggctcgctgctctttcttgcttgccagggtgttctggtaacagcaccctgattttcctcagaacagcaccttgctgcttcagtctacaaatctggagggcctggtccagctctagctctgtcgtgagcaggtgaccaggctagaccagatgagcctcacacccctggtgatagccactaagtagtcacaggtgtgggcacatgactctcttcaggccattgaggctcagtcctgggacccttactagaaggactcatgagtccagaaacagtggaagttgcctaggcaaccggttcaggccaaagattgatcttccactagtccaggaagtcttcctggaggtgaaacttcaggtctttaaattatgggagagaagagagtgaagccagcactcacgtgtgaccaccatccacctactgacccattcatccaatgcagtgagggcacatggcacggcatgccgggtgggctgtgtttttactctgtcatatgcttcctgcgttggttccctccagcctgtgcaccccaccctgctccacccctgcttgtgaactaaatgaagatctaagtgatcacatctccacagtgagaaaagacaccaattgtcccagagaaccaaatgcaggaggtgctggtctttataggggacctggggaagacactaactcttctctaaggggtgctccaggctgctctggcagtcgaaagagctagctgcaaggccaaactatgctactgagctgctgtgtgaccttgggcaaacagcttcccttctctgggctacatgatctctaggcatctgtccaataaatacactatttctaaatcaattagacagaaatgctgaggcttggaacaggagccagagaacgtgaggctgaccagtgaccccttaggaaggtggctgccatctgtcctgtttcggaagcctctccctctgctggactccaaaagccctgccttgaaacagctgccctaccactcccaatgcaacttcccaataccatttctctcttttcatttttcttctgttccaaggcagaacagggtaggaaatcgtgtcaaataaagacagaagtgcttgatgttcctaatggcatcccaaggaaatgaagtgtaaaatcacacgagttatttagcttcacatactgcttttatcagagtcctggacagaactccttagcaggagaaagcctgatttccttggaaagatggaattctggtgacagcagcagggagctgggctctcccggcaccgatgcaggatggaaaggtctgtaagtcacgccgaggcaaaaaccaagacacaaatcgccccccaccccaacgcacacacacacacacagagcaagaccacattttatccccacttttcaaaggcaaagttgtgtgtgggctttcactcagccagctttgaaagatcccttaactccaggatgctcttagagtaaaatccgaactccctgctttgtcttccaagcccaacaaagttggagccagccttgggttccagcttaccctgcgcactctccctcctcaaggccctccggtccgcctggctcctttctgttcctcgaagactccaggctcatgccacctaggagcatcgccctgaagtgcgtcttgtccagagtgctcctgcatagctgtcccctccttcccttcagggctcagctcaaatgccatttgttctgagaagcatccctggactacccctggtccgagcaggccactctttttggttttctcctggcatttatcactctctgggattgcattgtttattcgttgtttattttctgattcctcctcctagaaagtgaatggtggggtgggggagaggaagacaggaattacactggttttgttcatcattgtatcctcagagtcctcaacagtgcctagcacaggatgggtaaatctgccggagttcaactggaaaagtggaaataggagttatatacatgtaaattattttatgggatttgttatggagaattggcttatgcatttgtgggaaccgggtaagcagtctttgtcaggctgcgtgtcaagtctgatgctggtgtcaggtccacaggataggcagtcgagaggaaaggcagatgtcaagtagggagagcaagaacccacgagcacaagctagagccccaggatggcagcctgaagcccgtggctattcttgttgcctctgaccacagtggtgaggctgtcctgcagaagcctagcccttcatcacagagctgaacacatacacgcggctgggagtcgaaaagtagcaagaagttgccggggaaggttgcgggtgttgtggcaggctgcttcactccagtgaggtgagtcagcagatcagcagcaacgtgtgtcaactgcaaaacacggctgcagcctctcttgccttctgaatcttgcaagaaccttccaagaatcttccctgtggtccatctgaactgcaaacatgcaggaaagataattccaggaaatgcagttgagcctggccaagttaatagtctctgaagccatcataggtccacatcaacgctgatggatgaagagagggagtggttttagactaaagtgtgaactccttatctggcacaccaatctcagggtccagcctctgcctgctatcagccacctatccaaagtctatctgctctccagcccccatcagggtctctaaacccttgggctcatttggactgtcccctctgtccagaaccctcttccttgcccatctgcctgggtaaccctcagcaccttctaagactcaagctttaagcaagacctccttttggagtcatttcacatcaagattgagtcacagcctcagctgtactcccctcttcattctcctacctggaaacaactattatccacatgtctcatgtctctttccggagatggcctagtcatttaccaacaaaatgtatatttctttttttctcacatgtaagatagcatacaatacattttttctggatcttgtgatttttttctcttaacactatattctgaagatctttccaaatcaaaatatacagaaattctttattctttttaaaggttgcctgaagtttcatgtgggtggaccaaatttgtttaacttgttgcttttgctggatgtttaaattgtttctcattcttcactgggataaacaacactgcagtgaacatccttacacgtgcctagatcatgctcctgccccttctacacctggccgacttccagtgctctataggattaacataaatatcacctcctccatgaagcccacctaaatctttcctaaattgggttggctggttgccccactttgcctcctaggcagctacttgcactgcaacacttaccatgagctattgatgtgtccaacttgccctgtgacttgttcatctgtgaatgtcctgcacaatttcacagtacctgacacacagtagatactcaataaatgtttgtgaattcaatacacatcaaatttaaacccctaactcttggggcctccaaatcttgcttcattctatttttttttttttttttttttttgagacagagtcttgttctgtgctccaggctggagtgcagtggcaccatctcagctcaccgcaaactctgcctcctgggttcaagccattctcctgcctcagcctcctgagtagctgggataacaggcacccagcaccacgccaagctaaattttgtatttttagtagagacggagtttcaccatgttggccaggctggtctcaaacttctgacctgaggtgatccgcctgcctcggcctcccaaagtgctaggattacaggcgtgagccaccatgcctggttgctccattataatttatgtgtccacaccttgcccaggctcgtacagatcagtcaggctctctcgcctgccttattcttagccctgcttcttcagctttgctcctactgtttgctctcgtctgcaacacccttccctctctgaagcccttttccatccttcaaggcacaggtcttcccctacctcctccatgaagatgctttcattgaaatatcatctctcccctttctgaactgctgctgcctttatagtcactttggcatattttttcaagctccgttgctcactaattgtttcccgtctgttggttttgtgtccccagctagactgtgagttctttgagagcagaacttctttataaactcttgcatctcccacaaggctgggctcatggtagctactccatacttctgtgttggtcagtcaactggttctttcatggattgagtcagatcccggtaccgactgttaacaaccttgtccttggggcactacggaggtgccggaaatcatcgtgctggtaactgtcacagtaggaggcacccttagatgggggagtccactggagtgcagctcctcttatcctcctactgcaccctacctagattggagcttctgcaagaatgaacctctcagttacaccacgttttatcactctaacgtctttatggaccccaaaaacatctatcctatggaagtctctcctttggaagacacagataacatgtgtcttgggtccccagattctggaatagctagctcctcaggagaaacggagcacccagagagaatcaaatgagactcacccagaccccctgtccagtcatatttccagagataatgtgacacagtctgactgaatcagccttgatttccatcaagaagacatgaagtccgggcgcggtggctcacgcctgtcatcccagcactttgggaggccgaggtgagtggatcacttgagatcaggagtttgagaccagcctggccaacatggtgaaacctcattagctggatgtggtggcacatgcctgtaatctcagctactggggaggctgaggcaggagaatcacttgaacccaggaggcggaggttgcagtgagccgagatcgcaccattgcactccagcctgggcaacagagcgagaccctgtcttggaaaaaaaaaaaaaaaaggtcgaagcacggagtatgcagagaatgttctgcagggcacaggattcaaggcaggggtggctggaaagaccctggacacatccagctttgagagcaaagttaaagagttatttttttctaataggcagtaggaagacaaagcagttatctaatcaggaaaggaacatgaacagattgatatttttacaaaggtgatggtttggaaagcattccacaccagggaccagcactggaggtgtgacgaccagctagacagtctgttgtgattttccaggcaaaagaggtgataagagcagtgaagatggagaggagagcagactgttgatatttaggatgcagaatctgtcacgatgtggtcctgagtggtacattggcaggtggtgggggcaaatgggagcaaggatggtaaatgataccaaaggctctatttaggggtgccaatgaaagataaggaatagaggagaaggaagagcatgcttggatgggcagccagtggttcactgttgagcatgtaagacacctaggcagctccgtgcagtggaaaatccacacggatgctctgaatgagaggcagagtgtgtgcaggaggcccatgggtagagtgtgcgcaggaggcccatgggtagagtgtgcgcaggaggcccatgggtagagtgtgcgcaggaggcccatgggtagagtgtgcgcaggaggcccatgggtagagtgtgcgcaggaggcccatgggtagagtgtgcgcaggaggcccatgggtagagtgtgcgcaggaggcccatgggtagagtgtgcgcaggaggcccatgggtagagtgtgtgcaggaggcccatgggtaggcgggacctgccactgtggttaggtgaaaggtaacagaaaagcaaggacttaacactggggaaaatcaaaatttgggggctgggcctcagagggatgatgaaggaggagaagcaggcatgaccaaagttccagaagccagaggagtgggtttgaaggagaggcatatagcagtgtgcaaagggcacacagtgggttgaaaacagacccaaggtagaaatctgttgcatgcgagcacccaacatcacttttcttggttctaacacgctgatttcagaagaggcgagtttataatccattgtgtttggatggatcagaccctggcaccctccctgagttcagaagtggtcacgtgatcctggtctgacccatctgatgatcactactttctggctaagtttagaatttcaggatactagctcacatctgcaattccagcctttggaaggcccaaggcaggtggatagtttgagcccaggagttcgagaccagcctgggcaacatggtgaaaccccatctctacaaaaagtataaaaaattatggctgagtgtggtagcttatgcctgtaatcccagcactttgggaggccaaggtgggttgattctttaagcccaggaattcgagaccagcctggaccccatctctactaaaaatataaaacttagcagggtacagtggcacatgtccatggtctcagctacttgggaggctgaagtgggagaatcatttgaggttgcagtgagctatgatagcgccactgtactctagccagggtgacagagtgagaccctgtctcaaaaaaaaaaaaaaaagtataaaaattagccaggcatggtggtacctgcctgtagtcccaactacttgggaggctaaggtgggagaatcacctgagtctgggaggttgaggcttcagcgagctgtgattgtgtcgccacattctagcttgggagacagagtaagaccctggctcaaaaaaaaaaaaaaaaaaatgaattcagggataaggctataactcatgacaggccaatgagagtccattctaggacttttgaaaccactggaaaagagaaatttcaatctattggggttgctgtcctgtgagataacagggcagagcttccagagagcaatctgccacctcctggggttcactggcttgagaatgaaaccagcacaggggaagaaagagctgagagatagaaactccttgttgatatgtttcctcctctggatccagctacgcatagatgtttgggccaacacatttgctttgaagcttaagtccatttgatttgggttctgtcccttgtgaccaaaggagtcttgagccatgcatggccacatagctaataaggggctgctggttgcacaggcagcatctggagaaggctggagtccagccctgcacttgcacatcacacaaattaccacgagcaggtcagtggtcatggccatgggaaaaaaaactagaaacgagtgagttggctatgtttcaatacctgctagcggaaaaacacaatgatttcctttatgtttttcagggtttgagtcatccaggtcagtcctggcttggcacattaacttattgttcctgccaagggagatggttaagatgggagggttgatttatttgagtacacatgtgtccacatcatcctggaaaaaaagtaaaatgcagatatgctttgctggcatgtgttgtgacccaagaggcctcttcttggcctcaaagaccaaaagccacgatgttagacattgtttcagtcttgaacttgaccaagcatgggcaggcacctggtatgatggtgacataagggccctgggagaggagagtcctctccccacacggtggacagggtaggaggattactttctattgaatagtctgagacaagagtggtgagaaggagccagttatttgaagaacctaggaaggagagcaaagcaggtgctaaggaggtgtgaggaatggtgggaaggctagtgtggctgaaaaggggtgagcgagggggacagagaactgccctaatctctccacccattttgagtcttgactgtctggtattctctagcacttaatatagttaatctcaccttttgtgcattaatccatccagtcatccattccgcaaacatttatcacacctgacagtgtagggggtgctgtcttcaatgaagggttcaccaagcagaaggggcaagacacatcccccgccactacccccaccaggcagagaaaggcctgtgagccaagtcctggaaagaaaaaagctcaccatttaggtggggcctgttgggcagggctttgaatgcccagggggcactccgccatgtggaaagtgtagaaaacctaaatgcagaactccaggaaatactgatctatgggaaaaaaattgtactgaaatccatgattctggaataaatcagatctagtcttatactatattctaatacagccaagtggtggcagggactgaaggtttaagagaaagcgagaagagaaacacttaagatggagactactccattaattagcttcatttttttttttctgacaaccaagaaaagtccatcattagttaatattagtgatgcccagcttggttcaacttagagcacctgttttctgctgagcgtcatttgagatcggctggcatgggccagagggagctgtttcagggcctcaatcaggcagtgacatgatcagatttatgctttggaaaggtcactgtggctgcaggatgaggagggaagagacgggtggttgttagcaggctgctgggaaaatgtacacgatgagaaccagaatttgggtagagacagtggagatgcaaattccctgaaggcaagagttttgctgtttcattctttcagcagtgcctggcaagagataggcacagccactggtagatttttagaaatgcctactgtattgaattgtctggtattaaaagctacgggactccagacaaaacaaaagtgttgcctctctccagagtctcccttcttgggagaggcatcatagctgaagacagacccagatagggagttttctgttgttggaaatactcaaggttttgaggaactatttggggacacagaacacacaactcctgttacccgaacctggcccgaatctgtctgtcagatctgtgcagacgagacatatgttaggcctgggggcttttgctgcttgataagcaaacaaccatctgtctttctataggtgggagaaagaccaatgttaaaaggtgtctttgagatggtttagccccctcttccacatgagtgtgcactgcagacacatctggattcccaaggtccagaacaagaagctcggaaacgtgcttagatttccaagtgttcagttctcaataccatgccattctctttggagtttatgatgccttccagggagagcagagcccacgtgagctttccaacagtaagactactgctgtaataaatcatattgcccatttgtggcgcacttactctatgctgaggttgtataagggcttacatgagccctatctcatttaaattgttttcaccaaagggtgtgtgtcccactgctgacctgttgagctaaccatcccctctcagtacttgaaaacctgcacctgcccaagccatggcctggcttcaatggggcttcctcctgcactgaatgagatgacaagaaaacaatgaaacacttgtccccaaaagtgacttattggattcgttggcagaatgttagaaagtgggtatgaagcccaagaaacaggacacggagcctcaccaagcccgaggagtattaccgaatcctagcccaggccaagaatgagtcacaatgaaagcttttaaaatgtaaaaccatcaacctagatttcaattccaaggaaacacatacttggccatgggggaatgctttaaaaaaaaaaaaaaatcaagcttaagtcacttgacaggaaaataaaacagccaaggaacattcaaatataatgatttacatccttccccaactcccttccagtgtgggtcagggcgaacatggaccatggacgtgactggagccaggggtgcatgccctctctgggctccctcttggttaacactatttcaggcacacaatcccatacctaaacacagcctgcttagagctgcaccgtgctgcctttggggcctggtcagagctgcacggtgctgcctttggggcctggtcagagctgcacggtgctgcctttggggcctggtcagagctgcacggtgctgcctttggggcctggtcagagctgcacggtgctgcctttggggcctggtcagagctgcacggtgctgcctttggggcctggtcagagctgcacggtgctgcctttggggcctggtcagagctgcaccgtgctgcctttggggcctggtcagagctgcacggtgctgcctttggggcctggtcagagctgcacggtgctgcctttgggctgctatgccaacttcttggattttcctgacctccccgctgttaggctcttgggttgcttggggtggctgttttgggaataccaggatttttcttccattatttgtgtgcaagcagtgttcatttcgctcaaagaaatggaagcttgattgatctcctaaatgtaagaatgagattgtcctgtaataaatatttaagactgaccaggaaaggcgaccaccatctgctgaaacacaagaccaggaattactttgctaagcttcctgaacggagggaatgaatgaataaccatcctatataatatttgctcagcacctggtagtttacaaagagttttcacttaccttatttgatcttcacaataaccccagagaagtagacagggcgcggattacgaggattacgaaaaacccacatttttttctttttttcttaacagataagggctctaaaggcttaaagtcactcgagggaggtcagagagtttggggactaaatctcgagtctctcattaattcatgcacatatttaaaaaatatttatccggagcctgttccaagccagatgagatggcagtgggtacaaagatgaataaaacactgtccctgcgtaggaagaagatcacgttctagcctgggggagagcgccaggaaaagtaaacaggtccccccctgctttgtgaggtgatgagtgctggggagataggaagagagtggggaccatgtttctaatctgattctcctaccgacgaccagctcagttgttatttacaaatacctgtcccctaaaggggggagcggggttgggggggcttggccgtgctgctggggtcagagctcgcaggggggttctgccgcagtgtggggacaaactctcccttattgggcaaatatttcccggggcgctacgctaagcacacgggctccccgaatttccctccccagggcctctctgtctttggatggcctgtcagcaagtccctgcagcctccagcccggcccgcgcggcgacccagtcccctgtcgcccgaatcttccaccgctgcgaagcgtccccgggcgagcgccctgctctccgcgctgcgcggaagccagagccggtcctcacagtgaactcgcccagccctgctcgcggctctctcgattttatgtgggtttcgttggatgcattttgttatttgcctcaatggatgtttcacattaatttttagttgcacaacgaacgcgcgggaacattctccgtgagagaaaaagcacgggtggggggcggttaccggtgcttcccccggtcgcctgggggtcccgcacgcgccccgcgggtgccgctgtctggctggggtccctgggtgagccgcgggcaccggcttcgcgtctccccgggcgcgactccgctttgcaagcgctcagcacacgggaaaccctcggaaaacacacacgtgtgtaaagtttgttccacgcagaaacaaaggacgcgtgggggccgcttctggggcctcggtcctttgttggaaccccgcaccgcagcccggcccgcagcctcgccccgcaaggggaagccggccctgcacaggcccggggcccggaaggcgccgccgcacagctctgcgcccccgacccgctccggccgcgcgctgggccaggcccttggcctcaagcctcccgggcggctccgggccggacccgggtctccgtcgcgggacgccagcctgtttgtgggtgccgtgctcgggcccgggcggcccctgcccgacgcggccccacggagcccctgcacgaaccccgccgacctggcccggggcggcaagtcgaggtgcttagggcgccctgggcccggccaaccgtggaaaacccggcccggggcacgggggggcgcgggggtcgcagggccagggcccaggcagggaacagagatttttttcgcggggaggggggtgggaggtgtcaaagttttcggggaacttttccacttgagattccacgaccctgcagtgccccctacagaaagcggcagctggggagggcgggcgcccccgacgacccccgactgccagcggcggcgcggccaggctgcctggagttcttgttccttttttttttttttttttccttttatttcctcgtggttgtttgtcggatacatctttttccagagtgggaaaaaaaaaaaaaaaagcgagcgccgccgcctgcagtagagcgtgctcggcctgcagaggcagtcgtctccaacttttcctctcccgctccaactccccgcgcccaaaacttcagttcttggggagcccaaatttgcctgccgcgcaacttccactctaattcagcgaccaagggccctggcagcggtttgcagcctgggggccacgctccccaggctcaggcctgctcgttggcctgctcctagtgcctggacccagttgggggaggcgaaacagggcgcccgaggagcaccccgggagagggcggagcactcccgtgccccggggcaggagtgcagggagctcccgcgcccggaacgttgcgagcaaggcttgcgagcgtcgcaggggggcactcgcgagggacggacaggaagagggccaggggggaacgccagaacccgggaccacagcacggaaacggtccggggctgagctgcagtcagatccggggatggagggagccggagaagaggagtgagaaggccggggaggcaggccctgctgtcttcctgcaggccggcagcctgctggcagtggaggaccaggccgtccaggaaaggaaggggtcaggaggtcgggcagggcctcagcaggttcagacaagtccccagaagggagctgcaggcgccctcgagtccaggccccaagcctggctccggttgtccaaagagggcctaggccaggcctctggtgcggaaactgagtcacagccagacctcagggcacggcctagacgcttacgagccaaagttaggggtagagagcagagacctccggggggtctcagggagtagggggcttcagggcctcccagtctagagccggattggcgagttagacgcttgtagatccaaggttggattggggtggggtctctgggacgttggatcgctacgcaaggattggggggattcaagtgcttagagatcgaagtctgccctgggtagggggagtcagacaattggaaagcctaggtagttatttggggaggggtctctacgccttggcgaagcgcacagctgcatctttttggcttgaggcctgaggccttgtcgagaagcttccgtgaaagggtgggccagccgggccacgagaaagaaagtgaataaatcaggaatataagtgggcggggggcccctgagaggggggtcgcaaagggtgagacatggccaccaggcgtttaaccgacgctttcttgttgttgcggaataattccatccaaaaccggcagctgttagccgagcaagtgagtagtcacatcacctccagccctctgcattcacgtagcattgctgcggtgagtctcctggcggcctctccgacacacggaccgtgtgcactgcggctctgcctgtttgtctgtctctgtctgtctctctgtttaaaaagagaagataagaataataagactaagaataataagatctcttggctagagtcagggggcatctgtagccctggatgaggaagaagcggtgctgtgaggccgcagctccacctctgcccggtcttctcctcacttccgcagcacccccccccccgcaccccccgccttggcgtcactgcgctacaggccgcctgtaatttacatatgttttaacgctaacattgggaagcattgggcctttctgaagcctttttgtttcgttttgtttgaagctcccctccccccagtaatgagcctcagtttggtcctaagggctgggtcgccggatcgtagacccaaatccttgcaaaatgaacgactccctcccctcaaagaggagggagttgtgttgttgttttgttttgttttgtttttccgcccgttttcttttaacggccccgcagccctctgtgtggccttgttccctgtgaataattgcctcactgttcttcctgggggcttgcgtttgtgagactcaaggtgctagcctcttcactttccatttcccagacaggaaattaagctttcctctccattcgaactttttaaaaaaagcctgaggaggtatatgtgaaaattaaccccgtaaaatagcactttttttttttaattaaccacaacctttagttagcctagcagtagcgttttttaagggtggtcctggaaaaattactgtttggggtttgtttttaatgggggctacttttccctttctgagcctcagtttactgctctgttaaataaggggcgagtctggatgatctataccagacagtgatcgttagctctgtaatgtcttcaattgaaaagtgaagttatgaaactggctgtagttcaggctacctgctgtaggcagactaggttggaatagaagcagcgttggaacaggcgggaaatagccatcccaggaccacattcttgggggttatacttgatattaggcaattttggaacattcatttcacctcttagggactgtattgccagtttatttttttctttatggctttatctaaatgcttcaggaaaattttgccatatgtcatgattatcatgtctacaaagacagtttctcctttttgtaagtcacaggtggagaatgtctttggccatataactgatagaaaagtcattttaagccgtgtgagcggtttcaggaataaaagcatgtaaactcaggtcaaacagcctagaactagggacagagtgtgtgtgagatttcagttaattaagaagttgaagggttttttttacatttataaacggaaaggaattacattatattgaaataaatgtaaagatgtctggtagcatagaaacaggctaattctagcgctaattttgaagaagaaataatccaagaaatcgagtagaaattggatgaattcaattccttaatggaacttcagtaatgttaaataagaactgcatgttccttaaatgacttgattttgtgctgcctcaaaaactactgaaactcatattaagatttctaaggtatcagttttaattgaaaaacatattgtttatttttcaatttttaatcattaaggttcaaaataccctgaacctttgggtaacatgagggtttttttttttttcccgattaagtcagacagtttaaaaacctagtatctgagacgggaagctttttaaaagtgcatctctgaatcagaccactttagaaaattattttctaagttaggcaattttaaaaaatatttaagctaagcagaataattaaaaatggatagttaacgtatacagtttggaaaaatagatatgtcagggtatatacagatacatttagctaactcacagttttttgaaaatagatttctaaacccaactaaaaatacatttctaagaacgttaaaaaatgttttctaaatgtcataccattgaaaatgttaatatttatattagtctgaccatttaaaatctttctcagatcattgaaagcagtcatatcatttaaaatatccttatagtcaatccatactatctcaaaaataggttttgcagtctaacaaacatagtttgcctgaattcaaatttaaaaataaaacacagatttatatattttaattgtgttaaaaaatggcatgtcataaatttctgaagtatttagggttgaagtgttacatcttcactttgcttacaggtgattcgtaacaaaatctattctgcacacagtacggcgaaatgctaacaagactaaatagaggttatgattttttcaacttttctggaagttggaaaagctttataaacattttgaagcaaaagccatgtttaacacaatttgtaaaatctattgagtaactcttagcaatgcttttcactgcatatctagctcacaaaaaatttaaagccttgtttctgacttgtaaatttcaaagccatgtagcaaaccaaacaaaatcgtatctgtcaaattttgaatatggactaggtattaggtgacattaaggaattaattataatacattacatttgctaattttattagagatgcctactgaaatgtttagtggtgaaatgtcaaggcatcttacctaagtccttaaacccctccaaaaatagaggaagcaaataaggcaaattgttactcattgttaagtctagtgatgagtatgtgtgcgacattttaccattttgtaggcttttctgcatgtttgaaaatttttaaatagaaacttaaagtaagtatatttgttatagtaaagtaaaacagttaaaaagaggcaatttgtaaatacatgtctaacactcaggcaatttgaaaggaagaaattaaacctaagtttaacttaatttaaaaaataataacctggaattttaagtttccaattagaagaaaaagctgtagactttgatcttgatgcatttgataccaactaaaaatacacctaaaataacagactttttaaaaaaaaaattgtaatcctgaattttgacatcttatttcaggaaaaagctgcagaaattaattgcagagtagtgtgtatcatacacctcaaagcaaagcacacctaaagccatgccattcaaaaaatttaaacatgcattttttgcatcctagtttgagggaaaaaactagaatttggttgttgtagtggggttattgtgtgtccctgtgcgtgcatacagggttttgcagcattcaggcaaatatgtcaaataaacaggaatttaaggaggatacgcagtgaccagataaacacaaagcctcaagggccagaaggaacctaaaggtcatttggcctaatgtccccatttgtgataacccctcatgcctatcttatttggccatggtgtatgacaatgatggaaaatgccagcagctccatgatttttaccactaaaaagtctttgcctgttaatcccaactatttgtgtcctggggtcctgcttttagttctgttccttcgggtcttccttctgtctggtaaccctgcagccttgttacccagaattctttccaggcctagcattcccggctcagagtggttatgcttttttcctataaatgatgtttagtttttctgtatcctttttagatttcagcatccagaactgagcaaaattctacttttttgtgttcttagttgtattaaagttagtaaaactaattgtaaaaaaacagacaggtttgactttatgcactcctaacaaaatacagtcgtatttcccatgcattttactttggcctcagttttgagtgccccatcacgttcatgcctcagggcagcatgaaataaaggaaagagcactgagaattgaatctgagaattgaggcctaagtcctgttctgctgcaggctcagagtgtgtccttaggcaagcctttaatcttttcggacattttttgcctcatttgtaaactgaggggtttgggttaggtgatttccagcagccctatcgattcaacagtattttctcaagttctgttttaatacattgtttctcctgactttagctttaatttgaaaaggagaaattcatagtcaacagtgttgtagctgtcagtccaaggttactgacagaaatccttagaagtagccccagtactgtgcaaaagtaactttcacattattatgccagccaagtgcaggttttaaggtagcaactcattcaagcagcttggctttaggaaactgaaatggatttatgaagctaaacaattattcaaaacaaattgtaaagtcataaagaaatgaatgaaaggtagatattgagatgctcttctgatctgatgaaattctgtatggatttgtgtggtttccttcgatctccgggaatggatctaatataggggttggagctactttgttagtgtttactgcctaatctatactctgctttaaaataatgcataatctataattggaagctagcgttaattggtcttagattagtttgaaacataagcacattatttttaataaaatgtgtgctttaggaaaaaggaaattaaggattaactatggttataagaaacctgaggtccttattcaggcttgactacaatattagctaagatttatggagagtttactttgtgcctggctctgggctaagccctttccgtgtgtaagctcagctcatcttcacagtgctctatcaaataagtactattgtttttctcagatacagataaggaaacagattttagaggaggtaggaaactggcccagtgtcacccacctgatggctgggggctgtgattggaactctggcaaatctggcttcagagccccgtgctcacctcctgggccactctggtgttggctgcattttcagaacttgtgctgcagatcctggaaaatggaaggacctattgttttaaaacaattttttttcttgcaataggctagcatctttctttatctcactttatgaaccttacatagtcaattttaacttgcagattgaagattctaagttttagtacaagctgagtctgttggaaaattagttctctgtctttagaatccaagtatgaaatcattatatatttctctttagatctacttgcttttctgcttttaaagattccatgggagcagtgaggcttactttgagaataagggtactttgttggataaaagtgaagcaaacttttattttggcagtaacggaaataaagtaaatatcactatagcatagacctgtgtttccaactcattttgctcaacttttccagacttcctgagtaaacacagatgggtttccacttatttttcagttttatgtagaaagttctttagactataaattccacatgctacttggagttttcagtgtttgcttgattgcatgccattggaaggtcaaaaacctagatttagacattataaagatttagaaggtgatgatgtgtagtaacgtgttttcatttggctttattttggtctttcttgatggtaattctaaatgttttaattcaggtcttgactaaatttcctggtaatttggtggcagacagaattttgaaagccttctatttttaaatagcagaatggtggggagggtctttgaaaaggtgaccttaatttaatattcctgatgtggtggtagctgcctatcacaagtaattccctgaattgttaataaaattagagaggctggagggtggggtggaaagagacctgaacacctgggtctgtccccagtctgaccattaacaagctctgtggcttcaagcaatgcatttatacattttgaagcttagttttcttatttgtaagaaaagacttatttctagccctagaatcccatgattctgatttcacctcttatcaactaataattgtagaaatcagaagatcagggtgtgtgtgctcggttaataatccaagagcataggcacatgtgcagcagagattttaaccgaggtttgcaatagtacatcgttcaaagattaaatgccagggagccgctgcagaataggaagaagactgagatactcaagttagggattttgtcttgcatcatgttttattaataaaagattttaatgttctcttaatgttaagcttttaaaaaataaaaacattttttctttgtaaagtaaaaggtaattaaatcagctttccatttgatttattaatatcgtctagtactactattatggcagggtgtgtatagagttcttttttgctctcatagaaaattgtggaaggaatgaagaggatttgcagcttttcataatgtcatctaattgaatttttacgtggagtaaagtttgattacatttttattgctatcattgtttaataatattttgaccctgatagagcagcttcatttgcactatttttaaataagaaagttatgttttattttctaaatttactgctaaacataaaaaaacacaattgattattgaatttcaccactaattatttcagtgatcaatactgtacaaaaaaaagacctagttgtttagattatctgtcattagtaaatgtctgtccagaagatagagttccatgttgatctaaaaaagaacctttacttttcaattgaaacttaaccctctggtgtcatgcttctcccttccccctccccttaaaagaaaaaaattattcttaccttttgttttgtctcgtttgcttgcttttataagagccttatgaataactgtatgctttctagctaataataatacataccaagagatggtaagagtttttcttttattttgccacctgtgtctctctccgggaaagagtggtttctcagctctcttactaccagggatgaagccgtgtctgcgggatgtaatttgcagagaccttacatatgtggtcactcacatgttatctgaatacagctacagacaatttttgtgggtcatttattttttaattttgttgcatttgcaggtctgatttacatgttaaaatatacatttatttaacatgataaaattacattttagctctgctctcttattttattttcctgagggaaaatagaatgtggtattgtatgtgatatttggtgtttatgaaacagattaacagcatattttagtgaaaccaaagcaagtgtgttttatctgtttccagtgtattttaatatttacagtcattttttgcttgtttcctagctcattttcaaaacaaccacagtaaataaaaattaaagcatatattgatgtagcttaatttaaaaaaaaaaaaggagattttaaaatgccttgcttagtggatctttatatttagtcagcttaaaatctcagtgttttctcaactgaccatgccttgtctgtctgtctgtcccatgctgctttctttgtgctttccccaactggatgggactgatggggacaacatgtctcttcaggagctggacgaggtattgtgttttgaatatttttatatgttgggtaatttgagtttataaaatacctacttttcctgaagtctttgctcatatataaaatgctaacagcttatacatatttagcatttgttttgattactttataatttttttaacagtttaatatgtagaatttaatctattttcacaccatgtgaactgatgatttaaaaaaggctttgggaagatcgtttactagtcttgggaaagtgtcttaactttggaagcagtaaaggttgaacactttcttcaaggaagccagaatgttttgagaattaatgtctgtagcttcctgatttctgagaagtgagtcgtgcacttcctcaggtagacagtatagaaggccagcatgtctgtgaaggccctaaatgagaaggactgtagccacggcaactgtgggagggtcttccttgtcactcctgtctggaatgagatgacacccagtggatgcacctggagctattgtcacctgggcccagttctgcatctcctagctgggggtgcctttggcctttttattagctactagcatcttgcccagaaggtggagagaatatatattcaaagcactttattttagtagccggagtaaaagggttgagaaaaaatgagattaaaactgttgttaatgtttgtgtctattgtctgtttcagcattgaaggggtaagaatatttttcctgagtatagaccttttaagtagagtgatggagaggtgagggttgttcttgtttgttttcatttagaagtatgaatagtaaagtaggattaggaggatcactgtccttaaaaccagtggggtcctaactagtagattcagatctacctatatattctaaaaaccttaactagttgataatgacaacagactgagcacagcctaaatagccttcattgggaactggttaaatatattgtgtagcatctctgaccctctgtaacaggtaaatagtgaggcccatccatgagagctgcagtggaataagccccagacacatggcggagtggaaagacccagatgcagagcagcatggataatatgattcctgctccttttttttttttttttttttttttttcaggaaaaataactcatatttatgcttgtgtgtgcttaaaaaattcctgaaaagatacacaagaaactgttaacagtggatacaccccaagaaacatctgggatagaaaacttcctttctattgcaaacccttttcttagggtggatatatatttttaaaccatgtgcatgtatactttgccactaaaaacaattagttaaaaaaaaaaaacaccactcaacgggtagctgactgagccaggtgtcatggtcatgcctgtgtgggggtttcctttcccattcaggaacctcactgccagctccccgcctgggcacggggccctggagagggcttgggggcttggagagcaggcgttctgagttaaaatagatgttgctactggctgaacagtttgaagatatggagcttatgacctcaaaaggaagtgtataggatgcgagggagggtaacaaattatggaaccacttaggttgaagaaccatttgaataatgttccaaggaggggcacataagtggtcataattacttcggggtctgctgtctgaaccgatttccagtctttcctacttcctttttcaggcagcaagttccagaaactggctactcactgcatgaacttggcaggcccttttgcttttcttatgtttcacctctaagggcttaaaagggagtcttcacgctctgtgatcagaggccctgcgtagagagcactatctcctccacgctcaccccagtgctattagaaatgcaggttgctgcctcatcgtgggtgcccacggccacctcatttccttgtgcgtttcacttgcctcttttgctcttttgtgcagtgccgttatctttttcatgaagtgtggcttccacaattgtctgtgacgtacattttatttacctcgtgcattcattccactcgtttcttgtcggatcactcagctggttgtgattgtgcgttcaggactctgaagtgccaggtactggcctaggagcagggggtgtggttggggacagtgtccagaggcttctttgaagctgacgcagggcctcacattggcatctctggaaatagtgaacacccagctccagagtggattagatgttagccacccctttataggggaggcctgagcaaatgtccctgagtgaatatcacttgcatctcccagagtaaaggcatctgacggcctcacttcagaggcttcctgcagtctgtccatgtttgattgtcattctcctcctctagcctgagtaccctggagatgtcacttttccttctcagaaaacactaagtaaggtgttccctgaggaggacccgagcccaccattggttctcttacccagggaagtgtctggccctctcctttgttctctgtctttaatctacttcctgtcttatgacaaagaaatctctgggagtttttaaactcaagaattattttaaaagtcacaagataacaaatgtcaagcccccaaaccacactgcctggaggactgcacatctgggagtgcctgggccgggccccagtgtccatgttggtgaaatagggagcggcgctcctctgaaggattgttcttgggactggcatgggccaggtcagtagcagtgctcagtacagtgctcacagaaggcagggagggacggattgctcccctcctttttcttcccctcagagtatgtatgttagttgagaaaaaaggaaaatcagtgaaacttaacaacagtatcagggtgatgtgattctcaagtgtttttatctctatattttttgtatcatttatttttatttttttgagacagagtctcactctgttgcccaggctagagtgcagtggcgcgatctcggctcactgcaacctctgcctccccagttcaagcgattctcctgcctcagcctcctgagtagctgggactacaggtgcgtgccaccatgcgtggctattttatttatttatttatttttgtattttttagtagagacggagttttgacatgttgctcaggctggtctcgaactcctgagctcaagtgatccgcctgccttggcctcccaagtgctaggattacaggcgtgagccactgcgtcatcctatgccattttaaaagtatttattttgaccatttactaatttcataattagaaaaggtaagcattattttaaaattattacgggtttagaaaaatgtagtgctgacatcacttttttcttttatccacatgcttattcacttctccaacaactcggatttcttaagcctaattgtctattagcgaagtagtctgacttcatcatacaggctcccagagtttcacgtggaagtgtgagttgccagtctgttgattttcagtgtcccttctgggctttccaagtgttcattgccatagacagtccagaattatcggtattgttctcattaccaatgcgttacggctaaacttagttgatttttttagatggggaggaggtgtagctgacttttccaatctccacagaggctttgctatttctgtaatcttagtctacactaaatcagccttcagggaaaggcagggtttttaagagtaggagggccatagatttggaacagcaagatttataagagagaatgtgtatgttctttccatagatggagaacttgtccatactggctggtactctttaaatggacaaatgtcaacatttgaagtggatcaaaggcaaaagatacctttagtgagactggcaggaaagccattgggtgtgctgttttgaacatctgttggattttttctgcatttctctcaggaaggatggctctaggttagggtagcggaccccagtagttcttggagagaggaactacatatcaaagaggcaagaattcttaattctcttaagtacaatttttatttaaaaaatatggatttttttttttttacttcagaagcacaaatttatttatttatttatgtattgagatggagtctcgctctgtcttaataaaaggctggagcacattggcacgatcttggctcactgcaacttctgccttccgggttcaagtgattctcctgcctcagcttcccgagtagctgggattacaggtgcatgccaccatgcccggctaatttttgtattttcagtagagacggggtttcaccgtgctggctaggctggtcttgaactcccgacctcaggcaatccgcctgcctcagcctcccaaagtgctgggattaccggcgtgagccaccatggccagctgcacaaaccaacatcatatatttggagggggcaccatgttgaaattcagtaagggtaaggagagagaattagaaacctggccattttttaagatctgtatgaaataggatggcagcttgaaaattgatacatatgctggatcttcaacaataagaagacatgtttttaaatggaaagtgaggtttctgaaattaaaagggtgcttatgttgcacataaaatttgtttatgtccatatttgttcccatttcaaatagttgacgcttatcttcaacaattgttttcccttcccaaaacatactgtcttgttttttaatagtacatactgtgatacacattacaaatccatactgctaaaagaaatgacacatttcttctcaatagggtggtgtttctttattataatgaactatagctatagactgtatcataaaagagacaaattattcgctatttaaagttttcattcccaaagaatcagctgttctatcttactggcaaaactctgatacaatgtgtgggaaagctagtaccagctgagcaggctggcatccatgctgttcatgtaggaatctctaattagcaagcttccttaggacccttaacaaagagtgtgttctccccacttttgatttacatctaatttgaggggaacacatgcataaaatcaagtactgcttcaaagagttgtattcacttcaaccgacttttcatatgtggtttataatttgttgttttggataaaatgatactaatcccaatgcaggtaaatttagatagataccatctctctgtcttctttagtttaatgtgtatttgtaaacagtaaaaacagtacaaaataagatcatgagcttaaaaactctaaaatcactataaataattactgattgaaatgtgtaataataaaatatagtggattcgataataaactggtgtagtggaaattctaggacccatgaagaggtcctttagcaattttagattttactttgtataaacagctggagttcaagttctgttccagtccagcaatactgtagacagcacctgatgtatggctggcaggtgctgcgagctgggcctgtggtttgtccccctgctttttagtcagtgtgtcctccacagagttgtgtacctcttggtgactttggagcaggagtgttgaggaataaacaagtctgcctctgagtgcttggcacaggccctctctgtgcctgctctgtagagggtgaggtctgcgcctctctgtccacggatggtcagtaagagaggatgatctttactgacactaacgtcactcactggcggcctgtcctatagtgcctggtgtagttggtgggaaatgaatcaaactactgtgttttgttgttttaatctgatggcttgtcttgattcattttcttagcaaattgcagttatagtttatgggcctgtggagtgattggcacctttgagggtggaaggggtttctggagtcagccgacccaggtttcagtctgtcacataatggctctgtgaccttgggcaagcgacttaacttttctgagtttcaatttccatatttataggttagaataatagtttctaactcacctagtttttatgaggattaaaataatgtcaagaatgtaaaattcctattgatgaactcttgaaaccaaacagaaggtagtggtggtggagaattaccacttcacggcccgggagccccagacagtgcgggtttggatgacacaccatttgtttaagaaatgacactggccctgcagcatccgtgccacgcttgagcaccgttgggcttaatcacggctcctggacgtgctgggattagtgaatggggcctagtccttccagcgtggtcattgcctaagatgcgttccctgagtggacacgtgccccagagcacacagaaagcctgaagcagatggtggcagaaccactccagggcatgcagggaggttgatggtgaagataccaatttgcttttaagaattttactgtgaactctttaggatttagggcctattacttgaagtggtcttttattctaagtttttctttatatgatatttttcccccttcatctgtggattttaaaattttgtcttgttcctttattattagaaaagcaaataagtatttaatgaatgaaaaaataaatttagttaaatgcaaggaagagggaagaaaagcaatatgaatttttcacccaactctacagtgtgatttagaaaatttccaaagtattatctataaagggcttttatagattattttccattatattttgatcatcatttggatcttttgaaactggcatttaaaaattctgagctctggagggcacctcaaaatcttttcaacccattcactgcctgcaggcaagaaaacagcttaaccgtgccaaacccatgatttccctctgttttttgtgtgtgtgtgtgttttttttttttttttttttttgagacagagtttcgctcttgttgccctggctggagtgcaatggtacgatcatggctcactgcgaccttcgcctcttgggttcaagggattctcctgcctcagcctcccgagtagctgggattacaggcataagccaccatgcccagttaatttttgtatttttagtagagaacggttttcaccattttggccaggctactctcgaactcctgacctcagatgatctgcccgccttggcctcccaaagttctgggattacaggcgtgagccaccgcgcccagccgatttccctcccattcttaaaagctttctaccgcagtgtgttatatagttaaaataaacaggaaccatcgataccatttcaaaataaggggaaatgttccctgtggacatttaactgaagaaaagaaatgacagtgtaagattgcattgagatcttaaggattgcttttgccaaatggtagataatttgctagcggttttaggcagttgtttcacacatcttaacacatggttaatgattgtgtgactgagataactggatcagccctatttccaaaataagctaagtgtatttaagtaaaccttgctactattgagcattttgtagttgtttcatttactgcctagttttttttttcacttgcaactgatcacaagaatcattgaggttcatgccgttctatcacagtactagtagtaagaggtctttattttaaggatcttttgttgactttttcattacatttctatagccagatcaagtcaaatttacgttctgaagtatgtccaaggaaattaagagctggtgcatgaaaagataggaaaacaatccaaatcctagcagttatcaaaagcaagtttataatacaggcaagtgcattcactcctttctatatattttcagggagcaacatttaagagagagtaaacattcactcctttctgtatcttttcagggagtaacatttaagagagagtaagagtatttgtatctaaattggattagaataatttttttcatgtccctttactttcctgtagcttgctgatgaccgtatggcactggtgtcaggcatcagcttagatccagaagcagcgattggtgtgacaaaacggccacctcctaagtgggtggatggagtggatgaagtaagttccatgttagtttcatagcatcttgtttttttaagtaattatgacaatgtattttaagatatctgtcatataaacgaatttggctacacttgaatgtatatttctagaaatactttagctttaggttaagttgtctatgtgtgtgttaatgattttagctgtagttttaacattggtagtaactacctgaattataggaagaaattgaaaccccatgcaacaaggaagaatgtgattttctggtaatttgaattaaaagctgctcacacatcagcaagccaacaagtttgctgaagaccgaattctgtatgctgagtgtagctgatggaggcagaccatagcctgcctggcatcagtggagttctgtgacttcatttgcttagattcagtatgatgttggccggattaagcagaagatgaaagaattggccagccttcatgacaagcatttaaacagacccaccctggatgacagcagcgaagaggaacatgccattgagataactacccaagagatcactcaggtgaggagtgcaagtgagtcctggggaaaccagcgagccttctcatggcaatctcagaaactagagtgttactcagaatcagtctcctggagtcatttcccaacctgaagttctcagagggacctcaagaggccctgaagtcctccagctgtcagcgtaggtacctgtgaggccttggaggtatggggactgtttttcaattgttggcagataactgctgtggacggattaagtaaatatgaaatttcaaacattatcgagttcaatcatttgattttaaaatgtataactaatatcgtatactagtgttaagaaatttcaatgctaaattatagtcctcataattgaaaaaacaacttagtatcctagaaaaaattttttataaatattaaatttgattaattttaaaataataggactagtgttgaaacctcagtgtttacattttttactgaagtctcctgggtgctaattatcagaggagtgtggtgctttgagaaaagccctggggggttggaatgttggaaccctggctcttagcagtttaacagttacacgattctcatttaatccctctgactctagtgttctcatctgtaaaatgggactaataatcatagtaccatcctcataggatgcttgttagggattaaatgagaggaatgcaataataatatgatatatgataatacaggttgaacattcctaatctgaaatccaaaatgctccaaaatttgaaactttcttttgagtgccaatatgacactcaaaggaatgctcattggagcattttggatttcgaattttcagattggggtactcaactagtaggtattctgcaaatattccaaaatctcccgaaatttgaaatcctaaacattgccaatcccaagcatttcggatgagggatactcagcctgtctaacgtgatgatatgtgagcagctgggcacacagcaggccctacatagcaggagctgaaatctagtgaaatctttctgtgtatataaatgaagccacagattccttttatctgttcacctttctctaaaccagactgagtgaacagagcctctcacttctcactctggcttgtgatgtggcagtgttagcagaggggcttctctcccaggcttgccctgagcctcgggcttgttctcttagctcttccacaggtgccagcgtgccgtgcaggccctgccgagccgggcccgggcctgctccgagcaggaggggcggctgcttgggaacgtggtggcctcgctggcgcaggccctgcaggaactctccaccagcttccggcacgcacagtcaggctacctcaaacgtgagtgctgcccgggcctagtgaagggattttgagtaagaaaagcactttatgttttcttttttgccactattttttcatttagtccagtacctttcattgttagcttttgaacatgctcataccttgtacagtaaagggaagcctcctccccatgtgaaaccctggcttggaatgaaggcacagcgtggggtaccgaccaaggctgggggagggcaccaagatagttcagcatctcagcaaacaaaatttgttttgtgtcaagctgcaagaatttgaaaatcaaccaagcacattttaaaaacctgttgttttctggatgttggggtttgggagagctgctcttcaataggtaaaaagcagttgttattactgaaagccacatatttgcataacaaccaaagtgtttgagagcacctgagaaaacctccccagggtccttgaaacacttcctctgctggcaccacaggtttcacccagcagaccttttcttcccaaatagtgcaaagccagatttcagctctcttctcattctaatcaccctgtaaactgggttttttaaaattgcccttgcaatcaataaagtccccacatactccaaaaaacctagttctccctccctctgacaactggcatatttgtattttaattttattatttccaaaatttgattagggccatatggaattcatactagagatgcttctagagagaaatactgattttttaaaatgttttgtaacagcagttagattaaatatttctgcttcacttagagattctcagatggttgtgtcatttttatcttggcatcaagtgaattgtgcacatttacactgtgacttttgtcttgagtaatcccaaatgcctgcatattgttgtatgtttgtaatcctttactctccctccacccccattggagataggcttctttaaagcggctaagaatatctcaattttgactgttggagtttactctagaattcccccttttaatggtagaacaatactcaggatggtttacatattcaagtaaaatgaattcctatctgtgataggcatgaagaatcgagaggaaagatcccagcattttttcgacacatcagtaccactaatggatgatggagacgataacactctttaccatcgggtacgtgaacgggctgcaaagctgattgctgtgtctgtgcaccccattctgcatctttcacctcctagacctcgatcttctgtgcagtgtcagtggattgatacagttgacttgtatattcatcaggttgttttgcagcaggtggaagaacagccgtactgtttcttcctttccaaaggccacagggagaccttgtaatctgctttccagagcctttgggaaagtggtcaacaccctgccttcttaggaagagcccagagaaacagagggctatcccgggggttttgtttatctgcccttgtggagttggcagacgtgggcttctgtcttccctgctatggcctcagagctttagatcctgctggtttagggaatttgaatctttcctgttagggaaaaatgagtgcttactgtgctttgtagaaatattttcagaattcattttctttaaattattttcattgtctttaaattatatctaaacaagtataccatagctttcctgagagggaaaacaatctatccaacacattgtgcactgtcttgctagggttttacagaggaccagttagttctggtggagcagaacacactgatggtggaagagcgggaacgagagattcgccagattgtacagtccatttctgacctgaatgaaatattcagggacttaggggcgatgattgtagaacaggtacgtgagctggccttcctcgtgaataggttttcctgccatactatctgtaccttctttttcctgtactcctttcagggaaaaaaattggagccaattttcccaacatgtgtgtgcacctgtcctttatgtgtgtgtgggtgtgtgtgtgtgtgtgtgtgtgtgtgtgtgtgtgtatattaatattaatcaaatattaaatttgattaattttaaaataataggactagtgttgaaacctcagtgtttacattttttactgaagtctcctgggtgctaattatcagaggagtgtggtgctttgagaaaagccctggggggttggaatgttggaaccctggctcttagcagtttaacagttacatgattctcatttaatccctctgactctagtgttctcatctgtaaaatgggactaataatcatagtaccatcctcataggatgcttgttagggattaaatgagaggaatgcaataataatatgatatatgataatacaggttgaacattcctaatctgaaatccaaaatgctccaaaatttgaaacttttttttgagtgccaatatgacactcaaaggatatatatacatagcaatcctaatcagaaaatatgaagttcaaaatgctccagaattcaaaactttttgagtgttaacatgatgccacaggtggaaaatccctacacaagacctcatgtgacaggttgcagtcaaaactttgttttatgcacaaaactagtaaaaatattgtggccgggcacggtggctcacatctgtaatcccagcactttggggggctgaggcacatggatcacctgaggtcagcagttcgagaccagcgcggtcaacatggtgaaaccccgtctctgctaaaaatacaaaaaaattagctgggcatggtggcaggtgcctgtaacagctactcgggaggttgaggcaggaggatcgcttgaacctgggaggtagaggttgcagtgagccgagattgcaccattgcactccagcctgggcaacaagagtgaaactctgtctcaaaaaatatatatatatatattgtataaaattactttcaagctatgtatatgaaacattaatggtatatgaaacataaaggtataagaaacattaatgaattttgtgtttagacttgggtcccatccagaatatctcattatgtgtatgcaaatattccaaaatctaaaaaaaaaatcccaaatccaaaacacttctagtctcaagcttttcagataagggatactcagcctgtatatgtgtgtatttacaaattatatacataggctactgtcattccctataagaatattaataaatctttttttgataaatgaagttctaatattctcttcccatgcctcgagggtactcatgtgagcaccctactctagagacctagttgactctgaccgagctcagcaatgattctgacgctatagaagatttcccttctaattttggcaggttattgtgtaatggcaattggaaccactagcgttcaagtagaattaaattgttgttcaccgttaaaatctgattagggcattttattatcttgccagcagggatttgggtcctgatccccctgaaaccaactgcagaatggagtgttcaggctctggaagatccagttacattaattactccagtggttcccagtgaactgctatctcttctaatccagcatgtttccaataaaagctctgttcttcctcatagcccagtgtccccgtcttccaatttaattgtttaagagattaaacaattaaacatcttccccttgagtccaaatttttaattttaggtggtagactggagtttaccatttcctgctctgacccatagagatgtggatccacgtttatagacgtgatagtcaatttgcaggtctacttatgacaggggcgagcttacctggtgttctctgcttacttgaatccaagtacgtaggcagcaaatgggcgcagagcttctgtgctgctcagagcctctgtccactggaccatagatttcttagggccccaggaagtccgaatatggcatttctatggcagctgaaaccaataaggaaacctcagtctgtcagtacttctttctcgtgagctagatgtgatggcactaaccagcattctgccatcgagctcctgacactgcttgagggtgaactccagagccctccgtgtgtacctgcagcacacagggaaggaaaacatcatcttatggatgatgatgtctgtaatttgcatatctcatttttgacgttcagttttcccagttgctattgttgattgtctgtaactgtcatttattacctagggtacagtccttgacagaattgactataacgttgaacagtcctgtatcaaaactgaagatggtttgaaacagcttcacaaggtaatatgtctttcaagacttgggaatcttaggaactattttcaaataatcaagaattggtaagagggttcttttccaccataacgatcttcagcattcttgtgttgtccactctcaatacagtagtgtaaaaagggattcatcatttcatttaaagccaattgtgggggctgttgccgttttattgcagttaatgattccaggtgtatctcacacttaaatccaaaattgctaagaactcctttttgtgacagtaaattctaaagagattggagttctttcttttagaaaatatttcattcttttctaatgcttcttgttttaggaaatcaattgggcatttgctaaaatatgtgttgaaaatctgtctgcttgttgccgttgacttgggcctctcttgtgatacattcctgatgaattgctgatggagaatcattctgcagaagataaaaatctaatcttctctttaattaccacagcatatctgtattaccttgagaaaagagaagtttgttgaagtgagagtagtaattcttttattctgtgctaataaggtagctgtttcagggatgtttttatgatattctcttttaaaaaaatagatggaaagcatcttaggaatcttatcggttataagaaacatgcataaacggctgagactctcatatataattggttacgtattttctttaaaaggaatataacaatacttcacaaattaaataatatccatttccttgtatctttgagacccagtggagtttctagccatataatgagtgttttgccaattcactgttggactactctaccatttttctgaaatcagtcgcttcctataccagagatcgccccatttaatagcagtattgggtttacaaaaagtcagcccttgcactagtctaaccagaagccctgagctgtcttttcagggggcttgttgccatgtgtaggtggatatgagactccagcctgtggtgggaagagaagtctgaccttgtctatgcagggtttttttaagcatttagattaatttggttgccaagccctgtctattaaaagtgaaaactaacttaagtttctcactctgtaatacccaggttttgatgtgctgctgaattatgcattggttttgaagtttcttaaataaaaactagtgaaatatgttttgtaatataacacagataaaaggaaaagctttctctgcgggagtgagcaaatctagtgggaactaaaaattttgttttaggttctactttataaatcattttgagaggttttacagtatattatttagtattggcttccctggtgttctgggttacttattagaaaagtcagcgtgctccatcttccctccagccacaaggctgtaggcagcacgcgcgtgctcggcagtcggctagtctaagggtgattgagcgtcgggagctgctccccatgaccggactctcggtgctgtccccgtgcctgatgtttcctcctggtggatgaggggctcctccaggtgggcgggcaggctcacttaggaaacaagcccaccgcgggggatggagcaggagagattgccattctcgccagggctgccttcccgctgtctcctcctccctcctgtgccatagcaaggtctggaagaggcagcgcatgctctccctggacgtgcctcccggcgccctctgaactctgctgtcctctggctctcctttctcagtgctctgcgtctttcgccagccaggtggggccctttggcatttctctagcaggcatgatggagttcccgctcctgccgagcttccaggatgcggtgttaaggtgaagagatgtgcagggtgcagcctcgtccccagattgagcttggagggctcctttgctgtatcgttagcggcactgggaggacgcgcctcagagggatctttctgcatatgacatccatggggcacacgtgtctgtttttatttcaaaggatgagtttttgtttccaaatttaggggaggtcgaaatggggcctcttccgggtgtctgttgcctacctgccaggtacggtcctccagcccgttgtttccttccgcggtgaaggaactgtgcattcgctccaggaacacggaccgggaacaggcgacccgtgctgcaggggcacttgccacggcctgcaggaggaaaagccgggagaagcaggcccagctgcacccggaagcatgagctttcacttccctgtcaggctttgtcttagtagtaggtttccaacaaatccatttccacgtccagggtaaataagcagcaccaggatcatggggctcttccactcctggtgattgaattccgtgggattgattggagggattacaatcatgtagcctgtagcagagacctcagtcactgtgcagagagatctggaagcctcattctggaaacgagtgggacttgatttgggattttggggaaaatgacggccttttttccctcctctttttgtaggcagaacagtatcaaaagaagaatcggaagatgcttgtgattttaatattatttgtcatcatcattgtgctcattgttgtcctcgttggcgtgaagtctcgataagtggcattgggttttcgtgtgtgccgcgcgtgtggatctcccgggtgtgaggggcttggcctgcgccccgccagctgcccgcagaggtgcagcctcgaggaatctgagggcgtcggggcagcgaacctttgcatccacggactcctccttccctagtcctgctcaagcggtccggggaatgggtttttgtttttccttcattgttgagaatttaaggacctttgatactgctgcacaatagagattgagttctgggatcagttataatatatattttttttagaaagagaaaatgagctgagagtttacaggcactgcagaagctgttcagtattatatgtgtatatgctatttttttagcagccatgtctgagcagaatgttaacataatttttggaaaaattttctttaaaccatctggtttttaagaaatttggtaccaaaaattgatgagtagaggcaaaaatgccccttcatctttctctatatattttccagttgaaaacaaactaagaagtcctttaagaatttataatccgttccccattaacttaatttagcttttccatcactgttaatgatcagagtaacaaagtgtgaaaaataagaaaccatcattgatgttaattaacacatttagatgggccagttaaaacagcttcataagttttaaattaattgtaaatggaatattcctcatttaaaatttttgcactgcattttctactgtaaaccaaaagaggttactaagcaaaaccacctaaatttaagttggtgatttaaatgaatctcacattaaaagaaagcttgacagtgttatgaaagccaccagactcagccagtgtgtccccatgggtatccccagccatccttgctcaatccattacttatatactaactacataatgacctgttcaaaccagactctatttaatgaactgtgaatttacacagaggccattttaaatgggtcaccccatttaggattagtggatctcaaattattaaccaaacatcactccatttcaaagtaaaatattccaccagcgatttgatttattggctcttccattgccactgagcaatgcccaggaagcaggcacattgccaaggactgggggcatcttgactaggaagctcctcgtttgtgtgagcgtgggtcagaccgccaaagtaggacttcatcgtttacctacctattatcaatatggtgcttgaatatattcctataactgtagaacagtgtggaaagtgatggtaactttgaagttgttcatgttttattggctttgttttaattgacactagtagagttttaatggtctttgtgtaaattttaatggcttttccattgtttttgcttctcttaaaaagtttaagaagaatatgacctcattaaatgtgctgttttatttggaccagtcacacaaaatgtctctctagagttgactttaaagttgtttacagaaatttaaactcaattccagagattgaagttgtccaaacagctcatgggcttagtgtccaaacccctgcccagccttccctttccaagttggtgccacctccaggtagccattggtggttttcctattactgatgtggctgtggaatgataaggtcctagaggggccctggcatttcaggaagcggacctggtattccctgacaaacattgcttaggaaagagggccggagaataagaagccagcacctcatcagtcagccctgcaatgtgagacttccgtagctgttgagagtcactgcaggtgttctttcatcccatctgattttaacccatggttgagacgttccaagttagatctgctgctcttaggtgtggggctgtccacattagggaacttgcctcaaaaacagtccacagtggcaataccggacttctgttcaagctttttaaagtgctgagccttacaaacccctgaaggaaagtgaccctttaagagaggatcatctttttttatatttattttcaccaaatagggtgatgagggttggtttttgttccctcaacccatttgggtaaaataacggatctgattagaaactgttttaaggaggggctgggctcggtggctcacgcctgtaatcccagactttgagaggccaaggcggtcacgaggtcaggagttcgagaccagcctagccaacatggtgaaaccccgtctctacaaaaaatacaaaaattagccgggtgggacacgcctgtaatcccagctactcaagaggctgaggcaggagaatagcttgaacccgggaggcagaggttgcagtgagccgagatcacaccactgcactccagcctgggtgacagagcgaggctccgtctcaaaaaaaaaaaaaaaaaattgttttagcgctgggtttcccaaggtgggagagacagacccagcctggagctggcccctggcctgtgtgctgacttcttggggtcctcaaaccactgtatttttctgttgagcctgtacttggggagagatcagtagcatttgaggaagtaagagaaaagaatcatggtacctcagggtttctttccctttactcgctggcagccattgtctgtgggcacctcatgtttttccacactctactgggccgtggaggtaacgatcacccaggccagtctcctctgcctgggatgcgccctctgagaggaggcctagcagggcaggctccctctgggcatccctggatgcagcctctggacacatgcctcctttaaagtgtccgggtgcagctcaggttgagtggaggtagaaggagaaacagacatgtttaccacgcgttttccaaagctcctgatctttcccaagattgtaactgaaaactgctgtctcttgttttgttcgttttgggggtggtggtgctggctgggccatgcttgtgaagtgatgtgtgtctctgatttaacggattcactgttttctctgctaattgagagagcgttatttacattatttatttgttttgacacaagtgctttcagtgttttatcctagctaatggcttcttaaaggtaataaaacccttccaacgtaattggtcagataaaactttttttcttgtatgcttaaataaagcaattagtgaagcacttctatccaaaatgacttttttgtccttttttaaaaccaatttactgttactggaaactttttgtacaataaagcaatcacgcagattaaagaacatcctgcaatcctagtattaattttaacaatgggttcatgttttcttccagtgcatttgtgttaggggagggcttggccagttttgtgatcctctgggcccctgactctgttttgtgcctgaggcctttgcctcagtgtccgaaagtagatctatctaatggatgctttcaaagggacaatctatttactatctgatatacaaaaagaacaactgcctaaaaggcagataagtatttttcttatgaaaatatatgctttatatacataccaagaaacatttggaaatctccaaataaaactgtgatgtgccttgttgagaagcaattcttacacacaggctgtaagagacttgactttctaaatgattttgtttcctactctgttacaccaaaaacttgagagacaagtgtctgccagtttaactcaaagccaagactatgtttccccttgattgtgcctgtcctggggtcctccgaggaggacctttgtcctgaaacttgactttgatgcatttgttttgctggtgggagatgtggacctgagtgatggtaggggtatgtggtttcatcaccagaacctatacaaacaaaaaatagcagctgtcatgccaggtctctttggcacccttggcgtttggtcctgaggtgttgcggcgactcaacagcagaacccttcagagcctgtcaacaaaccacacaaaagaaacaacctcctcctcttgcactctcaccgtgttttttgttaagaaattacatttccccaactcgcatgttggccactggctctgtccaagaatcaaatccactctcgagggagagacgtttgccatagggttcaagaatattctgaccggcaatgctatttaataacattgaagaaatcctccatcccgaaggggaccacataaaggcggcaacacctctttggtgacctcttgggttatgttctcagctgagtctttggtggcccagtcttgaaccagcactacaagagtatgcagacgcagtctgcagaagcattgctgtcagtggagagctgcaggatgccaccaatgacttggaggcatgacttgccaagaggcctggaagtggggagccactggggtgtccctttgaatgctcactttgacagcaggtaaacaggctggatatggatttcctctgtgaaatttagcaaccatcctataagaagtctgatcctgatccaacgtttgagcaatctagaatccttcctggtccgtctgccatagttacgtagccacaacaaaatttacctagcctagcaccatttctatctaaatctaataggatagcatgtcattctacatggggccttaattgtgatcagcatcccttactctagtcaagccatgtgggaccatgtggagagatcttttcacagaagggatgtccctagttgggtgtagagaagacagctcatcacaaagacttcctgcttctctgtggttctaattcatcgattagttatggtaagtttccattccttctaagatttaggtaggcaggcctggttcatccaacatgaactacatttcagaacctagcactgtgcatgcacataaatgcatgcctagaattgtatatcttggcgtatattagctcttaaaaactaattttcttggccgggtgcagtggctcatgcctataatcccagcactttgggaggccaaggcaggtggatcgcttgaggtcaggagtttgagaccagcctggccaacatagtgaaaccccgtctctactaaaatataaaaattagctgggtgtggtggcacacgcctgtaaacccagctaccagggaggctgaggcaggagaattgcttgaacccaggaggcagaggttgcagtaagccgagattgtgccactgcactctagcctgggcaacagagcgagactccgtctaaaaaaaaaaaaaagccgggcgtggtggctcacacctgtaatcccagcactttgggaggccgaggcaggcagatcacgaggtcaggagatcaagccatcctggctaatgcggtgaaatcccatctctactaaaaatacaaaaaattagcaggccgttatggcaggcacctgtagtcccagctgctcgggaggctgaggcaggagaatggcgtgaaccctggaggcggagcttgcagtgagccaagattgcaccactgcactccagcctgggcaacagagcaagactccgtctcaaaaaaaaaaaaaacactaattttcttgaccacccagatgccacttctaaccttgctgcctgatggttttaattctgttttgaaaacaacctcctcccaagtgatgggtattagaaggaactaatgagaaccctgggtgcaagcagagacttttagcacgtatgaaagtgcttctgatttaggactcggagttagatggtgggtgtcagctgcgtgtgtcttgtccccaactccatgccaccctcgggcagacgtcatggtaccagtctatggccaggctttcttactacacaaagagacattccatggagtcaaatggcagagacttgtgtacaattatctggtcagttgaggcaaaagaaaataatcatttgtccaattgtccaaattagctctgtggattgtcctgaatgctcggggtaactgtgtggttctccacttcagttccgtaacctggctaagatggaccatttaaatgaggctccattcaacacaatgcacatttaaatgaggctcagttgcaagagaccactgggcttagcgttttcaatttgtcaactataattctataattgcttttagctaatcatccaaatgattacatgttgtaatggaggcagaagaccctcgtatgcatcatttggtctctttttctcagaggaagtgctgaaggatcaaatgttttgtgtgtctctgtgtgtgtgtgtgtgtgtgtgtgtccgtgttttaacttggtgttctgacgcacaacaccataatagacctccattttcatcaacggtgggggaatgagaacaacgccccccatcccaacatcccccttttccagagggggaaactgagacccaagtttccctcttgccaaggccacaggactagaactagaatcgtcagttttctgatttccagatcaggactatttctgcttatgccattttaatttttcatttctttccataaaattaaatgaccttcttcaagaaagatttaatggtcaagatgcgatttggtaaaaagcttcctcaaggatttttttcttattacaaagatgagactggctgaggctgagagatttgcaagcagtggtatgtcattatccccagctcagttttttgtgtaattggtgtgaagagattgctgctgatgaatcagcctgctgctcaacagaaaataatgattcttttgtgacgtgagtcagtgtacgtacgtgtacgtttgtggttgtttatgaaaggtatgtgtgtacataaaatgcttatcaagatggataatgtcattttaaagtggtaaataataaaaaatagtcctgagcaaaactgattttacaattgcctgagaatgcagcacttcattttaacactatgcaatggctagaaattgattttttttttttaaatccaattaagcctcaaggttggttatccatttaaaaggtcggatgagttaaacaatgacagtaccttcagttcgtgctaataaatttgcacagaacttcagcacttacatcgtgtgcctcacagaggcatacattttgtatgtgcacaacactgaactaccaaagtcccagcagtggtacagatacaccagcagaccctggaccccaactgggggagtccctgagctgaccgccggccctatcacctcttccacttagatccccgaagcaccccccaccccagagtgctgagtccttccatctacctggcccccttttctgtggccccaagagcactgggagatgaaaagttgcctctcatttaaaaggggggaaaaagatgtattcactacttggttttgtgtgctgctgagtttataatgtaacaaataaatcctgttttaaaaatagtactttatagtgtgtatttactgtgtattcatagtgcattaagaaaaagacttcggccgggcacagtggctcatgcctgtaatcccagcactttgggaggcagaggcaggcggatcacgaggtcaggagatcgagaccatcctggctaacgtggtgaaaccctgtctctactaaaaatacaaaaaattagccaggcatggtggcgggcgcctgtagtcccagctactaaggaggctgaggcaggagaatggcgtgaaccagggaggtggagattgcaacactgcactccagcctgggcgacagagccagactccgtctccaaaaaaaaaaaaaaaaaaaaaaagaaaagaaagaaaaagacttcggctgggtgcaatggctcacacctgtaatcccagcactttgggaggctgagatgggcagatcacctgaggtcaggagttcgagaccagccttcccaacatggtgaaaccccatccctactaaaaatacacgcccggctaatttttgtatttttagtagagatggagtttcaccatgttggtcaggctaattttgaactcctgacctcaggtgatccaccagcctcggcctcccaaagtgctgggattacaggcgtgagccaccacgccaggtcaattctttttactttttaaaagatctacattcagatactacagatagatgtataataaacacaagggtgtttctggaaaaaaggtgactcaggtttttgaagattgaatcattttcaatgctctagagaaacatactatttaaaaggatcctataagtgaaggttttcctaacaaaagattccttgatcaaaataaacatttagctcctaattttgcttttctataagtctccattttcttgtactgagtttgcttaaaggaatgcggaaccccatttggtctgttaattatttctcttttccttctcgcagcctccctatccaaaggctccaggtcttcaacatgtccttgaaaacttttgcaactacaaaaataattttgctggtgttcagaagtaaatagagtttagttcctgagacatgaaggttattgctgtattacactgtgcccttcctgggaggataatttaggctgctagaatggcaagggacctcggagagcaactagttcagcccgctcattttttttttctttctttctttttgagatggagtcttgctctgtcgtccaggctggagtgcaatggcatgatctcggctcactgcaacctccgtcccccaggttcaagcgattctcctgccccaacctcccaagtagctgggactacaggcatgtgccaccatgcctggcttttcgtatttgtagtagagacagggtttctctgtgttggtcaggctggttttgaacttccgacctcaggtgatctgcccgcttcagcctcccaaagtgctgggattacaggcgtgagccaccatgcctggccccagccccctcattttatcgagaggtcctaaaaactgatgctagaagagacgttttttgttgttaataaatgattctgctggtacatttttattaacacattctctcatcccactgatcccagaaagtatagacacagtacatgcagatgaggctaccaaatgtgcttgtcaagcaaagtgcaaaagatggcatgtagtatgctaccttttgtttaagatccatgaataatcttatttttttcaaatagaatcatgaaagataaaagctaatacaaatggttacctatgggggtaaaaaaaggttacctgtgggggtaaaaaatgctacctatgaaggatgactgagaaaaggggggaagggcaggatggggagatctttgaacatttcctttttataggtgtgacttgaatgatacaaaatgttatacgtcgtcaaaaaagaaaatgtagaaaaaaggaaaatggcaaacctttctgtgaagcacagatttatgaacctaaatgtacatcaaatcagtaagctgcacaaaaatcaagtatatgtggaatatatccctggaatatactcttaggaacaaaaagttaaaacatcttgaactctgtgttgtgggtttgttgtcgggagcggaggctattggtgagtgttgtgggaaacagagtgagaaaccctaggaggggctgggaaccagggtcctcactgtggcagagggagatgcgattatggaagatgggcaggtgaggaaaagccctgtcacgtggatttgaatgggaggaatcagtatcaactcatgatgttaaagaaaacctgatcttaacagatccaagaggaccaggagcaatgacgcccaagtggcagggagcatgcccagcacaagagcttggtctctaactctgaagctgttggctctaaccaaccattcccctcactgaatggagctagggtttctcggagaaatggctgactctggatttgggtcaaggaaggaacaaagtgagcctgtgatcatcttactgttccaggaaggacaaagtccttgaaaatggataagaacacatcaaaaaggagcctgcctgatgcagctctcattggcctaagtggggacacttgggagcagtgacgtttgatgagatgcacacacgtatgggctgtggcagggctggcttcaaggatgtgcagccaccatagccacatgggccctgtgcctagtttagtgctcagctgttgccatcttgaaattgctttttgaaagagaggcgctgcgttttcgttttgcactggactccacaaatcatgctgccagccctggggagggggaggtctttgctgaagaacaccaggtagtaagtgtagaagggaggatagagctggaaagtcactcaaccaatacttgattcaggcagaaatcatcactggataccaaagacattcaggaatagatggttgagacccagacggttcttagtctcaaagtgtcactccatggattctaaagaggaaattataattcaattaattataaaagggggaaatgcacttttaccatgaagagatctggcagaccccacttgcccaatgatgggggacacttagtttatgtgcctcctgatgaggttcgatgggaaccataacccgtatttttgccaaaaacgttcaacccaaatctaagaaaacagacgaatccagatggtgagagcttctgtaggatataccagtgcatgaaagacaagggtaaggactgttctggattaaaggaggccagagaggcttcacagccaaacgcaatgccttatttggattctggatttaaaaagaaaaagccatgaaggacaaggggacgattaaagtttcattgcagactgtatactggataatagtattgtttcaatgttaaatttcatgggtatgatcagcatatgatcatgattatgttggctggtgtccttgttctttttttttttttttatactttaagttttagggtacatgcgcacattgtgcaggttagttacatatgtatacatgtgccatgctggtgcgctgcacccactaactcgtcatctagcattaggtatatctcccaatgctatccctcccccctcccgccaccccacaaccgtccccagagtgtgatattccccttcctgtgtccgtgtgatctcattgttcaattcccacctatgagtgagaatatgcggtgtttggttttttgttcttgcgatagtttactgagaatgatgatttccaatttcatccatgtccctacaaaggacatgaactcatcattttttatggctgcatagtattccatggtgtatatgtgccacattttcttaatccagtctatcattgttggacatttgggttggttccaagtctttgctattgtgaataatggcgccataaacatacgtgtgcatgtgtctttatagcagcatgatttatagtcctttgggtatatacccagtaatgggatggctgggtcaaatggtatttccagttccagatccctgaggaatcgccacactgacttccacaatggttgaactagtttacagtcccaccaacagtgtaaaagtgttcctatttctccacatcctctccagcacctgttgtttcctgactttttaatgattgccattctaactggtgtgagatggtatctcattgtggttttgatttgcatttctctgatggccagtgatgatgagcattttttcatgcgttttttggctgcataaatgtcttcttttgagaagtgtctgttcatgtccttcacccactttttgatggggttgtttgtttttttcttgtaaatttgtttgagttcattgtagattctggatattagccctttgtcggatgagtaggttgcgaaaattttctcccattttgtaggttgcctgttcactctgatggtagtttaattccttttttttttttttttttttttctgagatggagtttcactcctgttgcccaggctggagtgcaatggcgcaatctcggctcactgcaacctgcgcctcccaggttcaagcgattcttctgtctcagcctcccgagtagctgggattacaggtgcatgccaccacgcctggctgatttttgtgtttttagtagagacgggtttttgccatgttggccaggctggtcttgaactcctgacctcaggagatctgcccgtcttggcctcccaaagtgctgggattacaggcgtgagccaccacgcccggctggtgtccttgttcttaagagatacacaatgaggtaggggtgtatacaacttactttaaatggtacagggaaaaatatgtgtacatacatacatatacatatacacatatacatatacatatatacatacacacacatacacatatacgcatgtttgtgtatatagaggcatacctcactttactgtggcggtctggaactgaacccagaatatctccgaggtgtgcctgtatgtgtgtatatatgtgtgtgtgtgtgtctatgtgtgtgtgtgtctatgtgtgtgtttgtgtgtatgtgtgtgtctgtgtgtgtatacatgtgtgtatgtgcgtatatatgtgtatgtgtgtgtgtggtgtgtgtggtgtgtgtgtgtgtggtgtgtgtgtatgtgtgtgtggtgtgtgcgtgtatgtgtgtgtggtgtgtgtgtggtgtgtgtgtgtgtgtatctgtatatatatgtatgaatctaggtgaagggtatacaagtgttcattatactagtttttcatcttttccaaaagttaatgaacttttcaaaaaagtttctagagaaatgtgttttcatggcaacgagttctctttcctcccttcagggaacatttagtgcaaatctaggtggcatgtctggtgccagttgcaaaaggcaacggaggccctccctgctgtgcaggcactcaggttgcagcaagggacagcacaaacatccacaacgcagggcagcattcaaggcggtcgtgcagctgtcacagttttcactggttgtgggctcacttctcagccagctgctcagggaggtccttggagctgagcctgcctctgcttcctctgggctcacgagcaggtcattctgaagcaggaaggagcccttccttgcttccacttcaggcctgcctgaggcacttccactggtctccagttacttgcaaggtcaagtacaacctgcaaggtcagtatatattttatgcgcactttatatctggcacaggagcttttctttttctttcttttttttttgtagagacagagtctctgtcctgcagattggagtgcagtggcgtgatctcggctcactgcaacttccgcttcccaggttcaagtgattctcatgcctcagcctcccgagtagctgggattacaggcatgcaccaccatgcccagcttatttttgtagttttagtagagatgggttttcaccatgttggccaggctggtctcaaactcctggcctcaagtgatccacctgcctcagcctcccaaagtgttgggattacaggcctgagccacggggcctggttccacatgagcttttgacagtgccagaatgaaccatgtcctttactacttcaggcctttgcatgaacaattccttggtcagggatcagactgcctgacacactttaaccgatccctccaggcccaactcaaaagtctcatcgtagtccaaggggccttccctaactcaatcttctcccagtgactggatctctggattttactgttctacttgcttccccttcctcctcctggccacacacacatatgcgtgcacatgcacaaacacacacacacacacacacgctattgcgtccccaaagcctcacgggtcctgtagcttttcagaactgatgttcaacaaatgtatgtcaaatgaatgaatgaatgaaaatgctagaaaatacgaagcagatgcaccgaggaaatgtttctttgaagtatcggatataatggaatctgagagcctcgtggcaatcagctgagtctaagcaggcattaggttttataggggtgaagtctgacatgaaattaacatataaatgtagatttcaaacacctagagccatcttacaagataggatttcagaaatgtgtcctagaatgtgaactgtaccaaaaaacatcctagtaagttctaggagctttattctgatttgtcccagaagtttttaatcttttcttcaactttggagcaaagtctgaacatccaattgaatgtggaataggtttcaagccatcaaaaacataagttgatttttgggttgcattaaagatctggtaatttgttttaaactttcattttttaaggaaaattaaatagagttgaatttttcattgacagtgaaatatatagtaagccatggattaataccttcataaaaatttatctaaacaaagtgctgcctgtcttatttatgttaaagtctgtaaagtcagcagtgaaaaagggaaagtactttcctggaatgtatttgtatctgtcacaagctgaatcttgaggaaattggcaggcatttgaagtggaataattccttagcgttctgtttagtttggatttcttcaattcgggggtggcttaaaaccagaatcaccaatatttgcttttaacaagcatctaacgttttctcttgctttgtgtacactaagtgctcaacaaatgttggttgaattgaatcattttgttcatcctttctggggactgtcagggttattcagtctattcttaaatatgaaagaattctaaaagaaaaacatctccaaaatgacctctccaccaacagtttatctcatttccaactccttgtacacaaacctgctagatctggctttctgaaatgcttcttggatccctcttcagtttgcaaaattctatagagtgagccaggctccccagtcgatctcctcacccactcctattttccaggaaccttctgttctaaccacacaggtttcagagcctgctggacatattctgcgtctgtgtttcctcccaggacttctcccacgtggaaggccttctttctcaatctcttcgcctgtggaagtcctattacatctgtcagggcatggccttagtctctcaccctctaggaagatcctccagctgtctcagtcctctggagtgccgtgtgcctgtctgcaacgtatttgcaaacagaaaaaagagtgagagatcttcatacacactgttagtaccctttaccaatgtgtgaaaacattcagctgctgtaaaatcttttgaagaaaataagatccaattagcgttgacttttatgtcgggaaagctgagggtttcaaaggaatgcctttcagtcattcaacagctttttttttttttttttttttttttttttttttttttgagtgcctgctctgtgccaggaactggaggaaaaaaaaacaacaaaaagtcaaaaagacctgccttcaggatgctgaagctctagtctgtggtgtttccaaggggccagggaccatggctcagagctgagcagacagacctggagcctgtggacagggaaggtgaaagcctggcttgtggctcccggggctacaagttagggagctagggggccagctgggaggtcagtggtggaaaacctctcacaccacgccagggagttgacagtgcttttttttctttttttcttttctttttttttttttttttttttcatttttaggctggttatgaagaagaaactcaaaataacaggagtggcttatggaactacatggaggtaacagaggagggtaccaaccaaaggcccttgagcaatcaggatgttgggtaacagatttttgcttttaaatgactcctgggtggagcttccccaatgcatcgtcattccctgacccttgcatctgaccctgtgggtgggaccctccgcctccaccatccactcaaggctcacccctggctcctccaccacccggctcctgccccacacccccgatggcctttcctcccctgtaaggcgactgaggtgactcaggtcaccctgctccttcctcgtctcatctcgtccctcctttcctgcttagactgtgccagatgacccttcttgcaaaggggtgggcgggaaggccccccatgcagccaggcagtgcctggatttgtaactggccatcccagcagcagtgccctggatggaaagccacgtccctgtcaccctctcacatccagggcagtgcctggcagagcggggtctgataaacgccagggaacctccgattaagtgaggaggaagtgaccgtccacgctgtacccaccatgccaggcagtgggacaaaaggacctgactcaggtccaagagtcactgggcccctccggcctaactgatgggtggccagggtgcggggtccctggggatcaaaagcagctgctaagggacctcgggggacctgcttggggccagcctgaggcctgaccgggcggaactgcgtcgggtgggcttgggcctacgtcggcccaggccccactggaggccaggcccgtccgggaggcgctgcctggcgggccacgtcgccccgcgtgttgggcagggccgctaggcccaggggcggcgccgctggaggccgggcgcgcgggccctactcggcagggcctgctcggggccggcttcgggcctgcccggccgggcctgcccgcacccttccgcccggcctggccggcgccccctcgcgccccgggcgggccctgcacgtctcgcgagcagcccggagcggcgggggaggcggggcccgcgggctgccgggcagggccggggcggtgccgaggccgggccggagcggggcgaagggggccgagcggcgggccgggccgggccgggcagggccggggcgtgggccggcaggaagatggcgaacgtggggctgcagttccaggcgagcgcgggggactcggacccacagagccggcccctgctgctgctcgggcagctgcaccacctgcaccgcgtgccctggagccacgtccgcgggaagctgcagccccgggtcaccgaggaggtgagcgggccgccggccgccatgcgacccgcgccgcggaagcccaggcccgggcggcccgcggaggccccgcctcgcccgccgcacccccgccgccgccgggccgggcccaacgaggccgggccgcctccctgaagggctcagccgccaggccagtcctcgcccgcggaggcccagccccaggccccgtcgccggtgcggcgcggtggtcctcctgtcagcccagccctgcgccccgcgaggccgcgacacctgcggacggcggggggggagacgtggccgctcccagggccgcgcgtcggccccgcctggcgacaggccctggcttccagaagttcccatggcagtgtccccagctgcctttccttggggacacctggcccctgccccctctctggtggaagccgcctaagccctatccgagtgttggaagcaaagcagcccccagcctggcccttccaggcttggtggcttcatcccaccagggggatgcgagccagcctagagacagttagctctgcagagaggcgacacatctccctaaggatgggaaaacggtggccgggagctgcgcagtgcccttccaggactgcaggagtggttgtggccgtggctgcagggcagggcctcctggcacgtggccgctgtttgaagcctctgtgtcttgtctctcccttctgatctagctctggcaggctgccctgagcacgctcaaccccaaccccacggacagctgtcccctctacctgaactacgccaccgtggctgccctgccctgcagggtgagccggcacaacagcccctcggccgcccacttcatcacgcggctggtgcggacctgcctgccgcccggagcgcatcgctgcattgtggtgagtgcttcgagaggaggcagccacggtgctcctagtcgggcagcggtgagctcgggcctggggagctcacagccctgctcagactgcagcgcacgcccagagggctgtggacgttatcatccctgctctgtagacagggaaacaggtccagagagacgcggggatttgccccagatcagttttggtggcaaatcagagactcaaacctagatttcctgaggcccactttgtgtctgtccctctgtccctcattttcatggctggtcaggctgttgacatctggtggccaatgtgttatttctcttggagcatgaccaatggtggtcccatggttccggggatgacctgagggatggggtggcggctgctgtgggacatctctgtctagatgtcacctgccagggagctgatgttccggaggcgttcaaagagcagctccctgcactccctggtggcggcccttgcacccctcacgccgtctccctatgtgccacagatggtctgcgagcagccggaggtctttgcttccgcctgtgccctggcccgggccttcccgctgttcacccaccgctcaggtgcctctcggcgcttggagaagaagacggtcaccgtggagtttttcctggtgggacaagacaacgggccggtggaggtgtccacattgcaggtgggtgtctggaagggcagacactgcccctgggcccgggcaagatcgggcaggtgggagggaggtcgggagagggaaaagcttgttgcgggggcaggagggggttcctgcccttcccaggagctttggttcctgggaagcggcagaggcttttccaaacccaggccccctgcctctgcctcagcgtggtctgtgacttcaggattctgttgtatacaggcagtgtttgttgagcacgtaatcagtgccaggaacgtccatgctgttttccaaataaccctgcccgtttatgtgagctccgtgtgcacgtgtgtgatgtatgcacgtgtgtgtgtatgtgcgtgcacatgtgtgttgctgtgcgtgtatgagtgtatgtgcatgtgttgtatgtgtggggggtgtgtgtgtgcatgtgtgatgtgtgtgtgtgtgtggtatgtgttgctgtgtatgtttgctggtgtgtgcatgagtggtgtgtgtggtgtacgtgtggtatgtgttgctgtgtgtgtgtgtttgctggtgtgtgcatgagtggtgtgtgtgtgtggtgtgcatgtgtggtgtgtgcatgtgtggtgtgtgttgttgtgtgtgagtactggtgtgtgcatgagcagcatgtgttgctgtgtgtatgagtgctggtgtgtgcatgagtggtgtgtgtgtgtgttgtgtgtgttgctgtgtgtgtatgagtgctagtgtgtgcatgagtggtgtgtgtgtggtgtgtgtgcatgtgtgttgctgcaccctttacagggagcacttctacatgtgttatttcactcaatgctgagaatgatccttttgaggctgcaaggccggaagtgatttcccagctccagatccttggatgggcctgacatcaggctcctgtccccacggcagcggtcccagcctctgcgcctgccacctccagtccccgagcccacagcgccacccaggttgtcttttctcatgtgtcagcgctcattcttcacttctggctctggaaggctgtcgccttcacccaggcaagctctcccacatcagcacttgggccacacctcatttctttcactgtgtgctctctgaggcctgtaaccactgcccctcaacccaaattcttccatcttcaccagcatgagatagctccccttttttcccttcgtctctgagcttttaaaaaagtctaactggtttgccttgcttaatcctcttttccctcttaacccatggagacagagtttttgcccccatcctgacattgttttctaaggactgctggatggggtgttgccgtccctccttgaagtgcatctgccccatccagaggtctccctccctcccgctgctccccagactgctgccacctctcggcatccccttcatggcctctccagcgttccgacctgctcagccctctccgggtcagacaccagcatctgcctcttctctctgtctttagggattttcttctgacttccaggcctgccatccaggtgggcacgggtgcccgcagagcccaccgggggctcaagcatcacccttatttccgaggacagcagggcaccctgacctctgctgccctcagtcccttcccctcctgtggacttcctgctgtcccttagactggccacgcccactcctgctcttgctcctctgcaggggtccttccctctccagcccagcatggtctccatccagcctctgcccacattccctccccagggaggcctggccctcttggctagcaccaccctcccatttgtcagctaaaccatcactactagacatgtcacatctttgttgatctcctgtgctcctcactgggttgggagtccccagagggcagggacctggtcttgtgcacagtgatcccagcacccgaccccacacatgaaaaaggcccagtaaacatctggtgatggaaccagtgggggcagtcagtccccatggcccccgaccccattggtcccaactagctagtgtgtcctgtttcttgtctttgctctgcccagtgccgtgccttgaggtgctctcctgggctgtggcagcagtctcctggtcaccctgccacagatggcctccttccagctcctgcgtcactcgccttccaaaggcacatctgggtgtgtgcaaggtggcatcttctgagtgctgtcagctgtcaggccctgcgctgaggcaggagtgtgcacacagcacgtgctggtgcactgaattctcactacagccctgtgagatacatcctgttgtccccacgacattgagtggctcaccggggccacggcagcaaggggcagagccaggtgttaagctgcagctgccaccactcagccctcttgggtcctgagcacaccatcatctgacacccacgtggcctgtactcagcttctcccttttcttccctgcgggaaccttccagtccccacccaggaccctgtcccctctgcatcctgtggcctcatcctcttctgtagcagggactgggactgtgtactgtgagtctctgctgagcttgactcccttggacgtctctgaattctcagagtcttgcacgatgcctggcacatgtggacagaatgagtggtcctcctctcatggtaagggacacccttccccagtgcagcatggctgtgtgttggtggagggcacccgcagccctgccctccctcccacaggagcgctcttgcgtcagagccccgagctcgccgtggtctggggtcttccaggtgacacctggcctccttggaggcaagtcacacagcattgacgcacttctcagacagtccttgtcgagtccccacatgccctcacagacagagaacccgctgacaggcggcagggacggctcaggcacattcatatcagagctgtcaaggtccaggtttctacctttgaggctttggggtttaattacctcggcagggcgggggaggtggccaggctgcagtatcgacccggcgcctgctgccctgacattatgagactagaggcagggatgataaacttgctgctgtcctgcacccccgcaaaacagcgctgctcttctcttaatattgtctttctggtgagcaagggaggccgtgcaagcagccagctgtctgaagcttctgtgcctggggatgcacagtggggaacagggtggggaaggggtgcccgcagattcagctgagagagagtgaagctcccagggcagatgtgagacacacatgagaaggcaaagaatggcccaagccagggctgaaggacacatttttgggacccacgtgatgtgtgctttggtgcatgtgcccctctctgccctgccttcgagtgtgggctctgaagccctgccaggccagcagggcccatgttttcagttcctgggtggacacgtcagttccatgaggcgagacctccctctgtgtccttcccctccgtgcccagaaccgtgctgtgtcaagtgacagcactagggcagccagacccccatctgtcttgcagggtttatgagggacttgcgtgggactcatgaggaaagcaacggcccagagggaaggcgtctgggagggccagcaggttcaagcactcaggatgtagagtgcttctgcttggtggggaggatctggaaaagctactggtagatacggcctatgagaagtgcctcgaaggatgactgggatcttggtgggagggaaaggactgtgggatctgcagaggtgaggcgtgggaagctcagggcatactcaggggctggcatgagggccacctaccttcagttgtagctggaatcaggggagaaacaggacacagggcttggaaaagatccagatacagaagggcaggaccccaggctggggactcctgtatatttgtggaggcgcagggtggtggctgtgctgaaggttctttctacaggtggccggtggccctgggttgctgggggtggggcaggcagcgagagccatggtccccctctcccctctctttgctgccctgtcagtagccctgtgggtgatgtttgcctctgctgccttttgttcctgggggatggacaaggggagaacatctgcctcccacctggtccccagtgatggcctttttctccctagtgcttagcgaatgccacagacggcgtgcggctagcagcccgcatcgtggacacaccctgcaatgagatgaacaccgacaccttcctcgaggtttgtggcgtcatcaggccgggggtgggaccaggctggggtgggtgtcatagactcccaggagagccagaggaaacctggggctgtccacaccctgacgtggccagggaacctcagggctgccctcggcggagcgctgctgtctgccgggctccaggaagcctcaggaaagggtgtgtggggaggacagagcctcctcttcaaggccccttggcaggaccacagccagagctacaggaaatgagagtgtgtggagggtgagccccctcttctgggtttcatcacacgcgaagctggctcccaagcccggctccccgacgcggcacaggcagcggttcatccctggccccagcctcggcctctcctgtttccagccatcttcatgtgttgttgtgctgttgttttttccatgaacatgtccaggagattaacaaagttggaaaggagctggggatcatcccaaccatcatccgggatgaggaactgaagacgagaggatttggaggtgggtgggggctgcatccctgcagctcttggcctcgggcagtggccaggggcacttgggtggcagggggtcggcgggccacatggcacattgtcccaaacttcatcctgcttgtgacctgaaaggaatcagcctgtgtccaagcccagtgccggaccctgggaagcagccgtccctgggggagaaggggaggcaatccagattctgatttggattctggaagctgctagatccaagtccttccctgcctgcagcctctccagcgtcctcgcgtgctgcacacccttactcctgggactggctcagcagggcctttctgttccttgaatacacaagttcccatcacggcaggcagggcctgtgtgcggatggctctccctatctggaatactttcccccaagatatatttttggtggaggccatctcaaccaatgccccctcctcagagaggccttccccaagtccccagacccacctttccccactgcccaggaaccagaggggcagataagtatgactcagctgccccgtggtgcttgtagactggcaagaggaaggcggctgtctgtgttatgtgtggctacaaaacaaatcactcggaagatagcagctgaatgcagcaacacttatcccctccccgtgctgtgggttggggatcttcccctggtgcagcgtctctgcctgctgttgtcaggttgttggctggggctgcagtcatctgagggcttgcctggggctggcgatgtgcttccgggcaggctcacaacaggctgctggcaggtctcagggcctcacaggccattagctggaggcagcaggtccttgctgtttgagccaccctccgagcaaggtctctgagcgagagatagggataaagagcgagcaaacaagatggaaactcccatctttttctgtgacctaatcccaggagtgatatctcatcacttctacctttttcttttggttagaggtgagacatcaggacctgctcacatgagggggagggactgcacaaggacatgaatacccagacgtgggggccacaggggccatcctggtggtgtctacctagacaggagccatttacaagtggagggagaggccgcttgtgtcaggaaaagcttcacagaggaggtggcatttgctgtggatcttacaggatgagttggagtttgtcaggcagccatgattagctctcgtcattgttgctatgattgtttgactcaattattgcaggactttgagccatagactctgcacacgcacaggccacagctttcttgagaagatgtgtcatgtaaaccaaagaggcagtggtgcagggactgtgggagcgagtgtgaaagggcggtgcagtccctgagtgctcaaaggattcaggaagtggggacgagcatgggctggggcagccttgaggtgttatccaaacatcgtttcattctgcaatcctgttcttttctttctggaaaggatacaatatttttttcccttagtgggttttcttgcttaacaaacaacactttgcatagaatttgtttgcaatctcagacattggagctaatttgcattccccaatcccacactggccaggggcaggagaaggggcagggagcaccaggctcaggcaggcggctctccaggagaaacaccagccggccagagtttccaggggcctctgggagttccccgctcagctcagcccgagcctaacccagttctccccacgctttccataggaatctatggggttggcaaagccgccctgcatcccccagccctggccgtcctcagccacaccccagatggagccacgcagaccatcgcctgggtgggcaaaggcatcgtctatgacactggaggcctcagcatcaaagggaaggtgaggtgcgggctggctctcagggtgccctgggggaggggaggggaaggtgaggtgcagggcccggctctcccgggtgccctgggggtggggtggggtggggtggggaggggaaggtgaggtgtgggcccggctctccagggtgccctggggttggggtggggtggggtggggaggggaaggtgaggtgccggcaggctctccagggtgccctgggggggggggaggggcccagtttgggtccagccagccctctgagaggtgtcatggggtggggggcggcgaggtttctgggggttctgggttggggtgggttcggggagagtgcgcagggcgggttcccatgtgctgaggcgacagcttcacgtggctccctgggtttcatgcccacccttcagaagggtctggaaacaaaagcctggccagggcccaagagcagccccggaaatgacggaagaaatggcaagcagggccagggaggcagggcttgctgcttgggggctttgtcccgagaagagaagggcaaggggacgcctgtgtctctgagtctgcccatggtccccactgagaaaacgctcagagtggccacacaagaccctccaaaggcacgtgacccccaagagcgaggggaatctgggcacggcacagaagcgagtcacccgggaacatcccggtgcggtggccctagaagcctgtcccgtggtacggctttctgtcctgccatcccaggaggacaggtgcttgtggagcccccgtcgtggccgagtctgcccgccccagcaagccctgccctcctccgcaccatctccatccattcatcctacacaccgtgtgagcagcctctgtgctcaggcctgggctgggaaggacagggagggagcagactgggaagtacatacctcaggaggtctggaaggagcagggagtgcatccgcagcagacactgcaaactagcagcctgcaaggctcacggaggcctggcatttttaaaatttgaattagctaccaatatttgaaaccaggaaggattctcatcaaagcctggatttccggccttttgtgcactcagaaggtctgccagtgctggcgttctgttcccgcctggcagcattcccctgcagccagtgggcctgcccctggtgtcacccattctccagtttggtttgcggtaggccccaccacttgctgctgccttcctgacactgagccctagtgtcagctgctgttcagggtggcgctggtgcagctcgccgcgctctctagcacgcctagtttatttcatacctggagaggatgagcagttcccatccctcctctaaaccacaaaactgtttagaactaagcagaaaatgacactaatcataaaaagggttttttgtttttttttaatagaaaaaacatgcctccctatgggtctcttggggtaatagatggtggaatgaatgtttgtttctggctttgggtcttagcatctacacgtttgacaatggtttcatttaaattgatcttctttactaatgtatgttcagtaggcagagttgccagctgtcttcactcatagttggtccaagaatactatctgttaactttgattttgaagagctccaatctcgtgaggcaacagatacacagatacttaggaaaagtctttaatacggtatcatttggcagagattcttaaaaatcccatttcacagtaaattccagcaatcacaacacccactgtgtgttcagttcttcagggtggattcttgtggctttcagatgtctgcagaacaaaagcattttggacacagtaactccaagtgttcacatggaatgagggaagtgaaggaacgcaggttccgcgtcttcgttttgaccatcccgcactctcgtgttttattttgggtcctctgtttcgacaccgggaggtaggaaatcatgggccctggaggccccgactgtgcccagagccagcccacaggatctgactgtcagagcgattctcagaaggaatgtgggtagtagattttgtgtcgggtcattgctaacgtccatgtaatgttactttcaggataagtaacaacgatatgcgaatttgaagcttttgtttgtgtgattaaaacgcaaccgtagccacagcaattttttaaacttcaatcaacaacagattttcggaggaggaatatgttattgctgactttgttcagagataccggcacacggtggtaataagcaaactgacttctagtcggttatgattcctaaattcgccacagatagtgcaccccctactgcctgcacctggtactggctgctcccaccctcgcacgcaccctcaatacccacggtcaccctggaagccgctacattctggctggtagagtcgtggaccctcttctccttggatcagatgcttgtttttgatgtcggcttgttgtggaccaatgtgagaagatgagcttcctgggaattcattcgtttgcttgtggcactaactctagtcacttagggaaaatatcgttgcacctgacttcatctcatgtggctgtgggtagacctgtgcagttagtcagctcccggcctggaaattaacacaaaggaaaaacctgaccacacaggccttccctagaggccacagctgcacagccttcagggaagctgtggtctgagggtggctggtagaactgccagagagtagggcattttccatggctccagatcaccttctgaaaatgcgactatagcccctgcctattcccggggtccacctggtctgcagaccccataataccaggaagagctgggtgttctggcaccagtgaaacaatacctggttttttattttaaaccagcccatcttccccgctgcagttggaaccgttctacgtggatttgggatcaaccagcaggcctttcctgagctgttactgtgtggagtgggcgctgaggctccagccattgatgcaaagaccccaatcctgacctgaaggcgctcacaatctctccccaacggcctggtgtgaaacgcagacgcaacgcagcaggcattctccccagtggctgcctgtagagcaaatggtgcagaaatggtcactcctcaaaaagcaagccggctggagccagcccagctcccagttttgcaagaaaaaaaaaatcacagctccattttcaaagatttcaagggcagctcaagaccagcctggactagcaggcctcaaatgcattactggagacccctttacgctcttaacaagtaccgaccccaaagaggctttttgtataacaatgtctattgatatttactctactggaaattaaaagtgagaaatttataacatgtataattcattaaaaataacatataaatccattgcatgttatcataaataattttatgaagataagcatcttccaaaatgaaaaaataatttactgagagagtagcattgttgtacattttcacaaatcctgtcagtgtctggcttaatagaagacagctagggaccttgcgtctgcttccgatgtagtctatggaaatgtgttgtttcagttgaactgtatcaagaaaatctggcctcacgcattttatagttgaaacagggaaaaggattttagtacctttttcagctaactaactatgaacattctttgctactacaccaaaactcaacaagtggtagcttcttaaaggctggttataacatggaatctgaagcctcatgaatagacttttgggctctgtggcagttaaatccgctgttctctctcactttgaacatgtggtttttcatggaaaaatgaatgttcacttgaaaaatgttggttcacagagttctgcagaaattcaaatttttgacacattacattatatagtatcaaaaaatcacttaatatcaccatccatctcatcagaaaactcattatgaggaagttgtcatggtgataggagaaagtttttcaaaattctgatttttgcttaaaagctcaaatgtataccattggcaataaataatgtcagctgtttctggaagtaagaggctcagtttgttccttttctgggaaatatctgccagatacctaaatccaattaaatgccatttgtctgtcagtttttctttcaagtaaagatggtgtcgtggccagagtggctcatggagctcagaactcccccagcaatcacagctgagcttctgctctgaccgaccactgcccgtcagcaacagcaggagtacattatgagtcacacggaatatggaaaatgtattgtacccaagggttgagagttttaaaaattaattttactgcttcagcaaggaaattctaacgtgaaattggcattggttcattttcccagagggcacggaaacgaatacagtggctcccggacctctttgggactgtggcctgatactccagcacagggggtgtaagtgtcagccccgtgaaaaaggcagagaccgtcttaaatcactgcgaaaatggtttcttctataaaaacagaaacaacatatgggggctggtgaaactttgcacaatcaatcagttgagctgtatttgcaagcccagtcctggctccacctgcaattgggaaggagctggcagctgtgacgggggagacatggtgtacagtgagcagccgtttccaggcattgctgtgtgacccattttgcacatggtttgattccagatcggaggccctgtttttccatttaaacaatcctgtgctttctcaaacagattagctcagaagagatggcttattttcagtagtacaagatgggtcattttcactcaattataaaagcagctcaatttacatctaaaaatactttgcactaaaattcaaagcttgtgtaataagataagggttcaaaaatgattcagtaaatttcatacccaaacctttacctctgaggacctgctgttaatttaaaatatgaacttgtgaatttgatttgggaacctgtaaaatgtaaaaatgtgtaacactgtcaaccagcgtataggaaacagtgtggacactgcaggagaagggtggcccctctttagacccaggttaaccaggaggtgtgaactattaaccaggaggtgtgaactagcaggagggcagaggtggccccttcttctggcgatagacctggcagtgacatgaaggagcgacaggtgtcctcactgctggtggtgtcagtgggggtggatgtgactgattttggcgaagagttcacatcaaccctcaccatcattcaaggttgtgatgaggggcagagaatgctgagcctaagtctcgttaggtggtaaagccctctaagtgccagggagaggaagctaggccctgttctggggggcgacaggtggccagggcaggtttgcattgcggcagcagcccctcaggcttcctccctgccataagcacactaggaatctgcaatgggtgcaggaagcacgcaagcccacccaggtccctgaggtgctggccagggacctccagcaagccccagaggctccctggacctcagcttccttctcacgctgtgcggaggagtggagagagtggccctgcagacagacccccaggcggcgtggcagcccgggactgaggtcagggtgcccggcgtcaaagcacggggtccctgtttcaatgtcagagcccggccacagcgaattctgcagctccgggcatctcctcgggttccccctccgtgcagttactgtttgataaccccaaagttctgtcaaaacaaaagggagcctcaccatctatggccatgactccctgttgcttctggagaacaccccacttggccaatatgaggttcatgagttctgtgggtgcccaggaggcctggtgtgggggctgcccaggcctgagagctggggaaggtggggctagcgtggggccgggtgggggtggggggcttccgctgccaggcctggacctcacagctcacctttgtcctggtccctttgtaccacccgcagactaccatgccggggatgaagcgagactgcgggggtgctgcggccgtcctgggggccttcagagccgcaatcaagcaggtgagtgggccctgcccgccctctgcaggggcatcctgggtgtgcctcgtgggtgctcccctctcccctgtccgtcccgccacaggccccaccagggtcctacccgagtctccccagcggatgcttgtcccccctctgcccccaggctcttctggggcccccagagcttcccgccttcatcagagctgctctgggaggccccgagggcaaggtgcagccatgttctctgctcagggcctgccttggctccagagccccatgagcggttggctcaatgaggaagcctggcctagaccctcatggcatgtggcaggcagaagctcatggcaggggcacacgttgttctgcgtacccctcccgcaacccttctttgcagcagagctgcctctggtgactggtctcaccaagtcaccacctccaacccccaggcctggccaggcccccttcctctcttgcgtgggcaggtgccccaatgcttagcccttgctcagtggcagtagtcactcggggggcgtggggggggtggggggtgaccttgagtgaccttcccatggagcccagatgtccctggggccataaaaagtgcttattaaacaaatgaagaggccagctcatgctggtaatcccagaactttgggaggcggaggcaggaggatggcttgaaagccagaaattcaagactacccatagcaaccttgcaagaccccgtttctataaaaaaaaatttaaaaactagccaggcgtggtggcgcgcacctgtagtctcagctacttgggaggctgaggtggcggaggatcgattgagcccgggaggttgaggctgcagtgagctaagatcccactgctgcactgcagcctgggagatagagcgagaccctgtctaaagaaacaggccaatgaggagtgtgcattgactcatcagccgaggttttaccttcctagcctacctttctcaggccagcaacccagttccttggggtaaacttgaaatggaaaaacaaaaaggccttggcaagtagtttccaatctggagggtcctgctcctggccgtgagggaggaggaggaatcccaggaggaaggagctccttctgccggggcttcccagctggccgtgcacattccagactgtgtgacgggcttctgctaccaggcccagccggtggggacacggaggtgcggggctgaggcggcctgggcaggaggggctggcaggccctcacctgtgctctgcacgggtttggaaacggcctcttagggctcacggctgtttctctcgtgctgagcacacagctggggctgtacgcagcctgcaagccccatgcctccatgagcacctgccgtggcccgtccactgcagagcctgtcggaagaggctggaggaggagcatgtgtcctctgtgcgctactccttcactggttataaactaccaagggacacggctggcactcaaggagggtcttgactgccccagcatcataggccacggggcagggtggctctgggctcccactacctggccctcctccttgcctctgcccaggccccgtggctttggcagatgggctcaccagaagaatgctgaggcggacgggcccagctgtgcggtgctcgctgggcagctctctctgaagggagcagttgctgctctggggtggcacgggggcaggggtgggcaagtggttctggaggagccgtgtggccagccctctgtggccgtctttgccgttcacccctggttactcctccaacagagggtctgtcctgcctctgggacaggctggctgggaatgccccagcaggaagactcttctgagcttgaattccctgttcacaggaagccacttgacaaatgatcacagattcatcaggcagcagccgtgagtgttctcagcactcctccacctctagaggtgctgcggcctctagaggtggaggagcacctctagatttgaggggtgctgaggacaccccacccccactctggacaaagatccccctcccacaagagctccagcctggaggctccactgtgaacgcgaatgtcctgcttggccttcacatatccttgttggcctcttagaaaggaatacgcctctgtctgagccacagaatcaatcctcagggtaatgcatttacccagagaataaaatcagcatccacgtgtccacactggtaggaatagatcactgaaggaataaatgaatgggggagaaccgtttctcacactgaatcccagtttcaggctgcagaggtagtgatggaaacaggaagtcgtcaccccacagccaggcttcattccaggtgagagtggcccacagtgctggaactggagcatgagagtgggatgggaagaggacagtcaaatgctctcagagtgcctctcgcagctttatagtggtgacactcacaacccagcctaaccaggtgtcccagggcatgtcaccagggcagggacagagccacctgacatgcctccagaggcagtgtacagggaaggacagagcatttctgcaggattcccaccaaaaatgcatggcctgcctgtagtcacaaggacacgtcagacaaacccagcactgaaagtgccaaggccacaaaagacaaagccagactatgcagtcgcccagattaaggagggcaagcaggccaggcttgatgtgtggtctgatctgatctggacgtctgaggagcacatggaatctggatggtcccgagaggtgatggtcctgtgttggtgattactaccccctgctgcccattgtcccatggctggacaagatgctgacattggcagaatctgggtgaagggtgttgaggaattgtttgtggcttttttttttttttttttttccccgagatggtgtcttgctctgttgcccaggctggtgtgcagtggtgcgatctcggctcactgcaacgcctcccaggtttaagtgattctcctgcctcagcctccagagtagctgagattacaggcatgtgccaccacccttggctaatttttgtatttttagtagagacagggtttcaccttgttggccaggctggtcttgaactcctgacctcaagtgatccgcccacctcagcctcccaaagtgctgggattctggcatgggccactgctcctggctgtttgtgactatttctgcaatttttttgtaagtttgaaattatttcacagtgaaatgttttgaactttttagaaagaggatgtaccattcaaagatggaagggtacgccaggagctcggtggccctgggctctgggggtgttagcgaccctccaagcctggcaccaaaaaaaaaagcccctgacccacttaccaacccaaaacccttggccgccctgggggaccaggcccaagccctggcgtagcactggagacccttcccacgctgtcgctgaagcactcacagtccagccccatctttggccaccctcttctgttagaccagcaagtcccaactgtgccaggtaacacccaggaagtgtgtgaacattgacagctccagggctcacctccagctctgctgagtcttggattttttcagccgctcctggtgattggagaacacctccagactggccgtgagggccgcaagggcagggccgtgcctgtgctgtctctgtctcacgtcttccagccgtgcagacctcagcactgtttgccccaggactgcagctcgctcgtcttctaagccagcacttctcaagtggggtccccatgttgttagtaatatgggttctcagctctgccccagacctgctggatcagaaattaggggcagggcccagccttcagcgggtagcagccctccctgggaggctgaaagcatccatttgggaatcctcctcctccccgctcctccctcctccccccccgcctcctctcctcctcctcctccccccctcctccccctctcctcctcctccccacgccccagcaggctacagatccagaactctgctttctaggaggacttcagggctcccctcctttgttggtggagctcatctctgtggcgtccatggcctggagccccatggcctcatcctgtgacctcagggtcatgctgtcatttattcgttgttcctaaacacccacttctccctggaatgaccacaggaggcctcagcacagggacaggccgtggtcactgtacacacagatggaatgtcagtgctggggtatctggggaggagctctgagaggaggaggctgagggtcctgaagcccctgccccgtgtccctgacacaggctgggctgcgagagtgggagcgggggacttggggcccttgtggagctgacaggtggctccgatatcatcaccctgaggctggtggggttctttcccctgtgctgcgtgggggtgcggggccatctgtgaggctcaaggactgagcggggacccagggaggtctcagggactcgcagctgccatgcccagcaccactgctgcagctcctgccactggccactccttgccctgctggctgcccctgccccaccatcccaagtgtttgcctttggtgagggctctgcacccgtggtggaagagtcggctgttccaggagatgagaaagacgctggatcctatagagctgtgtgtccgcgctctcgaggcatgctccatgctaggaggatgtattctggttaaagattcgtctgcgggagcagaggaagggcagggacaggggtctgggagctctactccatttgacattgctgcccgggtgtggcccgcttcggggtcagggggcacccttagaacctgtgcagggcaggaactgccaccatctgttggccacacatttctcagtgaacaaatgacttttggcatcagaaagccataacttcacacctaaacttccacgaggctgagctcttcctgcccctctgtgtgtgtacgtgtgtgtgtgtgtgtattgaggggacgcggctgctggccaccttctgtcggcacaggttggcgaggcttcatgactgcccagcccatgcagtccaagagtcccacagcccagcccatgcccaggctcatccactgcggcgggtggcctctgccaggggaggctaggaaaccccagtggtgagccttggccttgggatctgccaggactgtacccgggatggcagggagggcgagctttggtccctgcaacttggagccatctctctctctcctgctgtctgtgggtctgagaacccccagctcgtcctcccccctccccaaacctatgacctacaactggagcctctgcccacttctccctccagggtttcaaagacaacctccacgctgtgttctgcttggctgagaactcggtggggcccaatgcgacaaggccagatgacatccacctgctgtactcagggaagtacgtctggccctcccactccttcctgcccactgttggaactcgcgacccttcccggcctgcaatgccagctcactccaggcatatcgggagggcactcagcgttggggtcccctgggcagcaggctccttgcttcccggagggctggggagctttggtagcaggcgcacctcacgttgaggggcccatggcacctggatgaggtgctaggctcccgtgcagtgcctggcccaggagctcgtggtctaccctgcattaccaggacaggtctttccaaaatttaggcctgaaatctttgggtgtgtgaagctctgacccccagattccctgctcggggacacctcctgcatctcccccttgagattgaccctggaaagtcaaagctgagctggcagctgaggagcaagtggctccagaattcaaaagagaagagccctctccccagccccatgagctggtgcctgagtgggcgcctccccgcatctcctgctcttcctccccatctgccgggtgccaggcacagtgtgctgaaggccagcccagccggttcatgccacccactttacagaagaagaaactgaggcatgggagagccaaatggctggtctctggctctccagagcagcggggcagggatgtcacctggaagccctttgctccaggcactgcattgctgtagggactgggggcatcccggccttcccattcagggaacgtgttggggttcggggagccacagggatgggcagctccaaatggggtctccccagtttcaaaggggctcatgccagtgtcccaggaaatcccgtccctgagcggggatctctaccatgccccaggacggtggaaatcaacaacacggatgccgagggcaggctggtgctggcagatggcgtgtcctatgcttgcaaggacctgggggccgacatcatcctggacatggccaccctgaccggggctcaggtgagtgctccctggatccaccccttagctgtagtcccagggaaccccaccccactcttgacctcaaggtggggaaggcagcgcgtgggggctgccgtcaggaagttttcataactgggcacgaggaggcaggaggagctgcccgtcaagcttggtgtgggcagtaccgaggcccaggctggatgcagagccgggaaccgcctcctgtgtgcttcatggccatggtcctttctgcctgtgttttttctttttttctcaaccgtctcttttctggctcccttatttctctgtctgcctcccggtccctcttttgccttgggtgtttctctcctgccgtcccgtccacacgcttcccgggttcctgcccgcccagggcattgccacagggaagtaccacgccgcggtgctcaccaacagcgctgagtgggaggccgcctgtgtgaaggcgggcaggaagtgtggggacctggtgcacccgctggtctactgccccgagctgcacttcagcgagttcacctcagctgtggcggacatgaagaactcagtggcggtaggtttggagcctcgaacctggagcctgccacatgggtggagccgggcaggcggagccctgccttcagggtgctggtgcacccagggagctggggccccccagaagcagccacagtgcagacgagggcttgagaggcaggcgtcagggcacaggagtcatcccagacagcgtgggccactcactggcttccctgccacacagccaagggtttctcccccagtcttgggtctggctcagttgccccatcaggccctttgctggcttcccccttggcctatggtgggggcagactccttagctcatggtcaaggccctcccagcccagcttctgctgcctccccacacgctccctcccagccaccccgagctccttgcagacagcaatagtgacaggcgatggggcagggtggagagggcccggccggagcaacccacaggcactgtgtcctcctggcctccctaggaccgagacaacagccccagctcctgtgctggcctcttcatcgcctcacacatcggcttcgactggcccggagtctgggtccacctggacattgctgcaccggtgcatgctgtgagtgtctcccctccccactggccctggctgctcccgcccgcttgtccaaacagcgcccctctggctctggagctgctggcagagctcatcagaaacttctgtctgtgacccagcttccagcccgctgtccccaccacccccaggtctcatcctccctgggaacagagtggctgctgtgtgcgacccttccccagccagcctgtcctccataggggatcctgggccctgtctcacccatccccaccctgaggagctcccggggtgaaggcagagcacacagggccttgccccctgcctacgcctggcctgccagccctgaacgtgtccagccagcagcatggaaggctctgggctccggctggtgctcaggatctccttcctgagaaggggactgtggggcacgtggaggggacccaggaggtgaggggtccccaggaacccctcctgtgctgcagccccacgcccagagtctgtgtcctgccctttgcttgcagggtgagcgagccacaggcttcggtgtggccctcctgctggcgctcttcggccgtgcctctgaggaccctctgctgaacctggtgtccccactgggctgtgaggtggatgtcgaggagggggacctggggagggactccaagagacgcaggcttgtgtgagcctcctgcctcggccctgacaaacggggatcttttacctcactttgcactgattaattttaagcaattgaaagattgcccttcatatgggttttggtttgtctttctggtcgtcagcgtggtggtggaaacagctgaagttttaggagacagcttagggtttggtgcgggccacggggaggggaccgggaagcgctggggcttgtttctgtttgttacttacaggactgagacatcttctgtaaactgctacccctggggccttctgcaccccggggtgaggcctcctgcctgcctggtgccctgtcccagccccaggtcctgtgcagggcacctgcgtggctgacagccaggctcttactccagccggggctgccagcgcatccagccagcccagccctgtgaaagatggagctgacttgctgcaggggacctgatttatagggcaagagaagtcacactccggcctctcagaattcacttgaggttcaattaaatacagtcacaccgccccctcacctggcctcgttcttctttctccccctccattttagaaacgggtcctggagcccatctagggaatgtagtgcagggctgcctcctgcttctcccagaccggctctggctttgagccccagctggtcaacccagtgttgatgacaggagcccaggacctggggaggacagggggccgctgggcctaggcctggccttcctgaccattttgattttctgggtgcacacagcacagactccaggtggaagtgctgtgggctcctgaactctctacagcccggcagcctgcacggaggccgttctgtctctcgagggtcctggagcctgcgctgtgtgaggtcgactgtgcttccgtgcccctgggcactgtcctaggtgataaagggcagggccccgaagccaattcggatctcccgggagccccgccaggattcagggaacccctgaacctgggctccaggaaaagcaggtgaggcgggtccaaggcacccaggagccaggctcccactggcttgggtgacagtacaggccaggaccttgtccctgccatacatcccctttgctgtcagtcgcagcagggctgcctggggccccccaggaagggattgggtctgaggccccacagggaaggggacagtgcccacctctcttcagctagggccgagggtgaggacctggctgcagatctgtgggacacgtggccctaggctgtgtcctgagcccctggccaccccaccccaagggtccccagaatccatgtgcccccacagccctggaaatcaaggtgactttctgggcctgatcgcaagcaaatatttattaactgcctgctgtgtacacagccccggctgggcctgaaaaggcaagaactggctccaaggtcctggccctgtctgaggaaactgtcacccaacacaatgacagcaattgtgggcagcagccggggagacggagccggagctcctgagcaggggcggctgcagccggggttaggagccttcacgggtcattagcttgcttaatggtgctgcagtaggccccgcttgccggcctcccctgagacacccagaagaggcagaggtcctgaggtggctggctccttctccagggcagctggcaccgtctgctcctgctaccaggggtgcgcccgcatggacacaggatgcagggtcagggagcaggggaggaactgagtctcccttgtgcaggcacaaaggcggcctcaggaccagggacccagctgggcaccagctgctggctggcctggcctgcctgccggcgtcggggggcccacgggggtgagccagaggcctggctttccctggggccaaagggctctaggaggcaacggctgcttccccaggccccaccagagccctggcaacagggtcatggggcggctggcggtgctggggggcaggtgggtgctctgggtccacttgatcatggtttccggggagcagtgcaggaagacgagcttggtgcagagcccccacaggcaggctagcgcacagccccaaggaagtgctcccagatgaacttggccgagagcatcaccatggccacgccaagtaggcggggctaggaccccacccacaccccctccctggaatcccagggcccacctgggtgatgttatcccagagacagggacaagagatgagaggatggaaatgtctctgggaaaaaggctgcaggagctggaggtgatgagcagagcaggcgaaggaaagggaggcccctcctccctccatgttagagaagggagccctagatctggccaccagcggcctgtgcacacctggggctgagggcacacagggctgcacatacacactcaaggccactgtgagaacaggtgagcagggccagagggctatggaaagcccggctgaaggctgcacctccaggctgaagagagctttaccggcatccgccaggaagcctgggctctggggctgtgtcattgtagatgaccatttccaggtcgtggccacagccccggttctggtcacagctgggccaccaatcctcctgcgccacccaccacttagccatcgggccgtcttcagggcatcggccggcctcagctgctgcagccagaccctggcgttgcggaaggctggccagtccacatcctgcagcctacgagggtgcgctgtgtgaggggtacaggccccggcctgggagaggacccagatgcaggcccccagaactgatggaaaatctctccccagaggtcaggtctttgtcagcaaaggtgggaaaccaggggagcggcggcaccaggctccagagacatttgaaatgacttcagaagacccagggccactcagggtgaccacatcggacagctgcctcccacaggctgtgacggatgtttaagcaagggatcgatggtcacctgactctcaggagtgcaggagaggccactgagacccattcagaagggactgggtgttggtccctgtggactcggcctctggctggtggtgaggaggaggatttctcaccacccatcctctggcccctgctgcccaagggagcagactcctgtgagctgggttccgggaagtccgtctccagcaggaactccaggccaagcgcgcatctctgtgatcgtgtgtcaccatggcggtgcgtgcgtgagtgcatgcgtgtgcactggtctgtggcctgtggtgcgtgagttccactaggacccatgtgaggtggagggtcttccacctcccctcccattcgggccctccctgtgccacacagacacccatctgtgccttccccttctgtgccaccaaaaatggaagagatagacacttaaaagaagcaactcaaatggaatgaaatcgtttctgttggggaatgctcaagacgttcaatcatcttagaaaatcccaccccacctcccgctgcagattaattactgtaagtgcaactccaatcgggctggtgaccccccaggaaacctctgaagctgtcccaggctgttcccaacatgggacctccactctggcacaccaggacccgaggcccctgacaggctcctcgttcctgcctcgctcaaggctcaggtcccccacctgaaataccccctcccaccagcatctcctgcctcgctcctgctgccaggtccccaaaagctcttgttcatgagctcgcctgccatccacagcccccaccagaacccaagtggctgtggaattcgctgccctgattctctgcccagagcctcggtccagactgtgttccctggcgaattagtgttcagcatttttgtttatttgtttgttctttaacaaaagttgttttggtttgagattcagcaaaaatacacactgcattcagcttcctctccattcaggattcagtaaattggttgttttcctgtctgcttcgagtccttgcctcaaatgagccttcaacaagataatgcattgaaaagcccttggaaaagtaccaggccccgcgcacatgtacagcccaggccccacgcacatggacggcattgtcatcatgcagctctcggaggcaaggccagcagcacacaaagctcccacctcacccacattaggctcagcttctggggaacattggcccaggcgggggtccttccccacggcctcacaaatagggctcaggaggggtggggctgccttcatgcaaccctgctgctaggctggtccccaaagcccagacctgtgcccctccccatggcctgggcttgctttcttcccttgcacagggccaaggggacaaggatgcagcagatgagatgctaacacaccctcagggaggtgacagtccttcctgacatccaaccgatgggccatctttgctttcagtgcctgctggagtcccgagggctttggggatcagtccaggcagcattctgcagtcaggaaaacaacattgaaaaccaaaacccacaattacaaagcatagaagcctggtttacgttcaccgatggcacagttagaacccacggcagcctccagctgaaacgatctgttcccattggctgcataagaaactcagtgatgtcatggacccctttgcctcccttaaatcagtttagcagttaccccaacttcacaaccgtgagttcttttgagggcctgagacccccctttctcctaatgagttggataagtttctgtggcatccatgacccagcttgttccagtgcatgaaggcccaaagccagcttccttgtccaacaatatttgctaaacactactggcatgcagtccctgaaaagcagatccctcctgcaggtgtgtcttcccagcctgcaagtggaacggcttccggaaggaggagccggcacggccctgcaggaagctggaggagggctgtgcccctggcacccacaggggcgggggtgactgaggactcccccctgccccatcggggtgttattagccattaccagaagagctaatgtgtcatcagcaatttgccacatgcaaggcagcccctgggaggtgctgttatcttcccccctattccagcaggtgcagaagccccaggtcgcacaggttgtttgtgaaagggaagggggcatccaaaccccgatggcccagcagattcacgtatgctggctgatgaaggtgggagggagggagggaagtgaataaatagaaggccggacagagacatacagccaggccaaaaggactcattactgttgaatatcccagactcattactgttgaataccccgggcctcggtctcctcatctgtaaaatggatgggccttgcaaaacaaaaaccttcatgactttggatttgtcattgatttcttggctatgacaccaaaggcacaggcagcaaaagaaaaaatagacaaattggacttcatgcaaattaagaaattttgcacatcaaaagacagtattcacagagtaaaaaggcaacccacacaatgggaaaaacatttacaaatcatatacctgataaggcattgatattcagaatataaaaactcctaaagtgcaacaacaacaataaaagaatctgattcaaaaacactcaaaggacgcttcaatagataaaaaaggacacaaatggctcaaaagcacaggaaaagatgctcggcatcaccgtcattcaaaaaatagaaattaaaaccccggtgagaaaccacgctgcactcattaggagggccactatcacaaaaacagaaaataacaggtgttggtaaaaatgtaggggaatcacaacgctggcgcacggccggtgggaatggaaaatgggtcaggtgctgtgaaaaacagtatggcggttcctcaaaagattacaaatagaatgaccacgcgatgcagcaactccacttcggggtatacaccccaaagaattgaaagcagggcctcgaagagatatttgcacactcaggttcacagaagcattattcacaatcgctcaaatgtggatgcaacccaaatacccatcagtggatgaacaagtaataatcaaatgtcacaaatacaaggtgtggatgttcagccttaaaaaggaagttccaacacaggctacaccgtggatgaaccttgaggaattatgctaagtcaaataagccagtcacaaaaacacaaatactgtaggattccacttttacgaggtaagttagagcagtcaaaatcatagagacagaaagtaggaggctggttgccaggggctgaagggaggggggaatgagcagttagtgttgaacggggatagaatttccattttacgagatgaaaggggtcgtggagatgatggtggtgcgggttgtacattatgaatgcacttaatgccacttgactatacattcagaaatggggaagatggcagattttatgttacgtgtattttaccacaataaaaagataatacattttaaaaaatatagatgggccctggactcctctggccacctgtgccccgggaggcaggatgggtccgtgtgccatgcccaggtcagcagaactgggctcaaatcccgactctgccacttttgtagctttgagtcctggcgtcagtcagccagattcttcacctgtgcaagggggacatatgtccatgaaagtgccatgtaaatgggcaaaagacgactcctttgctcacgtggtaaaccccaccctgcaacagttgtgctcggcagaaaaccctctgtgccagggcactgctggagcaaggaggggctcctacaggctctctcgggtgtgcgtgagcgtgcaggccagtgggtctcgtgtttccttatccacgtagtataccacgtgctcgctggctacttccacattcatgaccagagactcattcctgaattggggaaggaaaagccaagtgcagatccggagaaacaaaggtagccccagatgctcgggcccagcttccttccccatcccagtctgcaccctgcaccctctgccctctcagctcggcttcctccatccaatcttcgcttggccctgaaaattccaggcagaatagacacacatggctcctgcccactcctgtgcaaactcgtgggcccccgaaggaagacatggtatcttcctatggctgggagatgtcgcagtcccatttcctccccatgctataaataaacgactcacagacagcagttctaggcagagggaatggtgtcagggaacactgcaggcccccacctcccctccgtgtgtagttttgtattcactcattcattcaatgaacattcattgtgctcctgctctgtgtcaggtgctgagagacgaagttgaggagagatggcccctgccctcccagggttcacagtcccgccaggaggacaggtgctcatcacagtattacccaaagaaatacaccacaaactgggatgactgccgtgaagtatgggcaggtggtgtgatgaggacattttaaagggaggcctgtccttgcttggggaggggaccaggtagggaacgcctccctggaggtatagatacatgagctgagagtgcaaggatgtgagtactcaatggtgcagaagatgggagaaatcagttccagtgcagggtgcagcatgtgcaaaagcccaggctggagtgggctgtgacaagttacagaaatgcaaaggaggccactgctgctgaaaaggagaggggggcacggggatgggggagtgagatggggtgggagaggtggacacaggccttgcaggtcacgagagagtgctgtgtgaatatgaccatttccctgaggacgccccagtcctcagcacggggtggctggaattcccacagagagccacaggcttactggcttgagagtgagggagtggaatttgggctgtcagagcccagggaagtcccagggatggggggaagtgagaatgtcctgcaaggcaagagacagagcaccctgaagctcggtctgactcctgtttctggtcatggtagagctgcaggggctgcatttaactactgctttagatgagttagaaagccagacaaatctatagaaagcattgtttcagacacaagaaacatgcagccccagagtgatgcctgcgagaaatggaacaaatgagatgcgcctccaaccagcccagctccctgcctggggagagtttccaggtgtggcccagggaggagaaacccaagccaagcccaggcaggtggcctccatgagctcaagggacagagttgaacatccaggatggccaaggcagctggagtttgctggacacagaactcggaagaagagagtggcacagagagaaaggaatccagagacgggcagggggttcccctgagtcttcatggagtactgagtactcctcagcacatgtgaggaggacactaccccaagctagggaaggaaccatcctaaggtgcagaggggacaaggaccactcacacagcacccaaacaggccacattcccaagaggcaggagcacagcaaaggctttgaggtctgaactgccatatacaacagcactcaagctccaggctcacctctgagcagcgcatgcactggtcacctgcaagtcacacagccaaagctcttaagagagaactaacatctgaaccaccgctcatgggagagaaagaatgtgcagtgtgaatttcactggattcattgcccgctaaagaggaggaggaggaggaggaggaggaggaggaggaagagttggatgatgaggagtgggggaaggaggagagaaggaagaggaagaagaagaagagaaaggtagaaaagaaggagaaataaattagcattctccagaagatttaaacaggatccagtcttctaacatacaaaaactacaagtccaggatgaaaacccaacattatttgacataccaagaatcaggaaaatctgaccaattcttaagagaaaatacaatcaaaagatgccaatcctgagatgaccctgatgctggaattgtcggatgaagacttcagagaaatgattataactatccttcacgaagtaaaacttaaaaacattgaaatggatggaaaaataggagtttgacaaagaaaaactataaaaaagaaccactaaatgtgatgtggtatcctagaacaaaaaaggacattaatgtaaaaactggtgaaatctaagtggaatctggagtttggttggtaggaacctaccaatgttggcctgttggttttgacaaacattctatggtatgttaatgtaagatgtcaaaattagggaaaaccgggtgagaagtaaatggaaatgctctgtgttttatcttggcaacttttccgtaaatggaaaattattacaaaataaaaagtctaaagaatcaatatggcagaagaaagagccagtaaacttgaatatagatcaatagaaattattctaactgaagaactgacagaacaaaaagatttcaaaatatgagtgcctcagggacttgttagacaatatcgaaacatctaatactcttataattggaatccctaagagaagacagattggtggagataaatattttttgaaaagaatgatagcagaacctttccaaatatgggaaaagacataaatttacaggttcaagaagtttagagcactccaaacaggatgaaatcaaaaaaatgcacacccaaacacatcataatcagattactgaaaaccaaagataaagaaaaatctaaaaagcagccagagaaaaaacatacctaccgcagtgataaacaatgactgaagattaaccagaaaacatggttgtcagaagacatgggaacacatctttaaaaacatgaaacaaaagaactgtcaactcagaattctacatagagcaaaaattgtcaagaatgaaagcaaaaaaaaaaaaaaaaaaaagacacactctgaggaagaagaaaagacttaaagaatccggccaggtgcggtggctcacgcctgtaatcccagcactttgggaggctgaggtgggtggatcacgagatcaggagatcgagaccatcctggtcaacacggtgaaaccccgtctctactaaaaatacaaaaaattagccgggcgtggtggcaggtgcctgtagtcccagctactcgggaggctgaggcaggagaatggcgtgaacccaggaggcggagcttgcagagggccgagatcacgccactgcactccagcctgggcgacagagactctgtctcaaaaaaaaacaaaaaacaccagtagacctactctaaaagaaaggatgttgttcagacaaaggaattacaccggtataagacttggaacttcaggaatgaaggaagaacaacagaaaaggtaaatatctggtaaatataatgggttacttttcttctccaaagtacctaaaatgtatataagctataaaaagcaaatattataacattatcaagggcattaaatgtatgtagatttaatacttatgacaattataacagaggagttaaaagtataacataaagagggtaaagtatgacacagagaaggtaaagataaccacatagttataagccttctatattttacatgctacgatgaaatactaactctaaatagattatgaaaagttaggtatgtatataatgcctaaagcagcaactaaaaagtaatgcaaagagatacagcaataaaagccaataaataaaataaatagaatattaaaaatattcacataattcaaaagaagccagaaaaaggaacatagaaaacaatgagaaaatagaaaaataataaaatggtagacctaaatgtaactatatcaataatgacattaaattgaaacaatctaaatatagcaatgaaaaaaattgtcacattggattgaaaaaaaaaaaaaaaacaggatccaatcatatgctacatgatatggtttggctgtgtccccaccaaaatctcatcttgaattcccagatgttatgggagcaacccagtgggacgtaattgaatcatgggggcaggcctttcctgcgctattctcatgatagtgaattactctcatgagatctgatggttttgagaaacaggagtctccctacacaagctctctctttgcctgctgccatccatgtaagacatgatttgctcctccttgccttgtgccatgactgtgaggctttcccagccatgtggaactgtaagtccaattaaacttctttcttttgtaaattgcccagtctcagatatgtctttatcagccacatgaaaacagactaatacactatatataagaaatacactttaaatataattgtatagactggaaattagtaaactatggctcagagggcaaatgcagcccatggcctgtttttaagaatggtttttacatttcttaagggtcgtgaagaagaaaaggaggggaagaaagaggtaatagaaaccatatatagccacaaaacctaaaatatttactattaataactggccctttgcagaaaaacgtttgctggcccctcaattgatagattaaaagtaaaaggataaaaatgatataccaagcaaatactcatcaaaacaaagcagaagtggctatgttactatcagataaataagacttcagagcaacaaaaaattaccaggtacaaataggggtgttacataataataaaataatcaattcaccaagaagatgtaacagtcctaaacagtagattccccaatgacagaacttcaaacgatatgacacaaaaactgatagaactaaaagaagaaatccacagttatgtttggagacttcatcacttctttctcagtatagaatacatagatggaaattcagcacaaatttagaagacctgaataacactgtcaacttgacctaactgatgtttatcagccacttcagccaacagtaatggaacatgtattcttttcaagtacaaatggaacattcaccaaaatagatcatattctgggccattaaaagcttaacaaccttaaaagaattaaaaattatatgatgtatagtctctgaccatcaaggacttaaactagaaatcgacaacagaaggatatctggaaaattcacaaacatttggaaattacacaacatacctctaaataatttgtgtgtcaaacagaaagtgccaaacaaatgatctaagattatactttaagaaaccagaaaaagaacaaattaaacccaaagaaaatagaataaaagaaatgataacgataagggcagaaattcgtatactgaaaacagaaaaatagaaaaataaattaaaccaaatgttaggtttttgaaaatatttaatacacttgataactctctagggagactgactgcaataaatagagaaaagacacaaattataaatatcagaaataaaaaaggagataccactacagacactacagatattaaaagaataacaaggtgatactatgaagaatgctacccataaattaacaatctatataaaatgatggattcattgaaagacacaaaacaccaaaattcacccaagaagaaagtgttaacctgatatgcctttgtactaaagaaattgaattcttattttaagacattccaatacacaaaactccaggcccagatgctttcataggcaaatcccactaaacatttaatgatgtaataatatcaattatatccaagctctttcagaaaataagagagcactttctaactcacttaatgaggccaacattatccttcctgatatcaaaaacaaagaccttagaaggaaactaaaggtcgataactcatacacatctgcacaaaaatcctcaacaaagtagtggtaagtcaaacccagcaatatacaaaaagacaatgtattatgaccaaacgaggtttatcctgggaatgcaaagctggttcagcattaggaaatacattaatgtaattcatcatgttagcatgctaaagaaggaaaatcatgtgatcatttcaataaatgagggaacagtacttaagaaaattcaacatccatttatgattttaaaaaacctctcagcaggctgggtgcagcagctcacacctgtaatcccagcactttgggaggctgaggcaggcagatcacttgaggccgggagttcaagaccagcttggccaagatggtgaaaccccatctctaataaaaatataaaaaaattagctgggcatggtggcagccacctgtaatcccagctacttgggaggctgaggcaggagaattgcttgaacccgggaggcagaggtttcagtgagtcaagatcacaccactgtgctccagcctgagcaacacagcctgactctgtctcaaaaaaaaaaaaaaaaaaaaaaaaaaaaattaaaaaacctctcagcaaactatgaacacaaaggttttcaatctggtaaagggtatctacaaaagaactacagctaacattgcacttaatggcaaaagactcaaagttctcccaaggcaaggatatctattcaccaccatactgaaagccctagaatgtgcaataatgcatgaaaaagttaaaaaaaaaaaaaaaaaaagaacttgcaaggaggaaataaaggcagataacatgactatctgtgtagaaaatgctataatctactgtattctacagaaaagtctctagaatactaagtgattttagtaaggccagaggacacaaggccaatatcaaaaatcagttgtatttctatatattaacaatgaatatttcaaatattaattttaaaaatcagcatcatacccatgttcatagcagctttattttcaatagccaaaaggtagaagcaacccaagtctccatcaatggatggatggataaataaaatgtgatacatgcatacaatgtctgtatattcagcgttaaagaggaaggaaattctgacttatggttcaacttggatgaaccttgaagacattatgcttaagtaaaacaagattgtcacgaaaggacaaatactattattactccacttatatgagttccctagtcagattcatagagacggaaagcattatggggtttccaagggataggggaagggacactaaagagttcatgtttaacagggacaggtttagttttacatcatggaaaagagttctgtggttggatggtggtgatggtagcacaccatgtgaatgtacttactaccactgaattgtacagttaaaaatggttaagatacattttatatgttcattgtaccaccattttgaaaaatttcaaaagtcaggtttaaatgggaagtctagagctaaaacattgcaatatctcacatgaaaaattcactaaatgtacttaacaacatagcagagacagcaaaagagagggtcagtagacttaaaacaggtaaatagcataacacagaaaagaaagatgaaggagaatgaatcgagttccagtgacctttcagacaatataaatcagctacatacacacacacacacacacacacacacacacacacacatatatatatatttagagggagaggatggaactgaaagactatttgaagaaaaatagccaaaaattccccaaatttggtagaaaaaaaatcaattaagatccagaatgaccagcaaaaacacaagcaagatgaatgtaaagaaaaccatgaaaagaaggtcataatcatgttgctgaaaacccaagacaaaaaaaagtttcaaaagcagagataaaagacgttacaatcaagggtgacagtacaaatgacaccgacttttctcaggaacaatgaagattaggagataagagaacaacatcttcaaatttctgcattaggaaaaaaatttgcaaacctctcaactcagaattctataggcagcaaaaatatcttggctgggcgcagtggctcacgcccataatcccagcactttgggaggccaaggcgggtggatcacctgaggtcaggagttcaagaccagtctggccaacatggtgaaacctcgtctctactaaaaatacaaaaattacctgggcgtggtggtggccgcccgtaatcccagctactcaagaggctgagctaggagaatcgcttgaatccaaaaggcagaggttgctttgaaccaagatcataccattgcactccagcctgggcaacaagagcgaaactcggtctcaaacaaacaaacaaacaaaaaatacatctttaaaaatgaggatgaaatagtgacatttgcttttatttttttcttttcttttttttgagatggagccttcctctgtcacccaggctggagtgcagtggcgcaatcttggctcactgcaacttccacttcccaggttcaagtgattctcctgcctcagcttcctgagtagctgggattacaggcgcacaccacattttctttttttctttttttgagatggagtctccctcagtcaccaggctggagtgcagtggcgtgacctcagctcactgcaatcttcacctcccaggttcaagcaattctcctgcctcagcctcccaagtagctgggactacaggagtgtgcccccacacccagctaatttttgtatttttttggtagaggcgcgatttcaccatgttggccatgattgtctcgatctcctgacctcgtgatctgcctgccttggcctcccaaagtgctgggattacaggcatgagccaccgcgcccagccaatagtgacattttcaaatgttgaaaacagtaacaataggaacaacaaaaaactgagaatttattactagtagacttgccccacaagatcttctaaagcagggtgtccaatcttttggcttccctgggccacaacggaagaattgtcttgggccacgcataaaatatactcacactaatgatagctgatgagctaaaaaaaaaaaaaaatcacaaaaaaactcataatgttttaagaaagtgtatgaatttctgttgagccgcactctaagctgtcctgggctgcatgcagcccacaggccacgggttggacaggctcattctaaaggatgttgtgactgaaggtaaatgacagcagatagaactcagatctaaaggaagaaataaaaagcaactaaaatggtaaaacatggattatttaaaataattttttttgaattttcttagaagacaactgactgcttaaccaaaaattatgacatcatatggcaaggtgtatgacgtgtatatgtaaagcatatagcaacaaagaacaaaggatgatgtgagaggggataagtggaactatattgttgtaatgtttatatattttagatgaagtacagtatcaaatactcttattcagaaattatcagcaccctggcttctctaaactccagactctctgttcaactcatagagtccactgaatttcgcatacccactccctgtgctgtggggtagaaaaatcttttcaggcgcaaaaagaggaaaaaggaaataagaaacaaatgaaacatataaaaatatataacaagataataaatttaaattcaaccatattacaataaatgtaaatagtgtaaacacaccagttaaaagtaagagatgataagcttggatatagaaaaaatacccaactctaagctgtttacaagaaatccacttcaaaagctgaaagtaagaaatagtaaaaggatggaaaaaggcatatgctaacacttatcaaaagaaatctggagttgctgtgttagtataaagataatggggatttaagggcaggaaatattacaaggaaaaggaggataattttagagtcataaaaaggaccattcctgaagaagaccaaatcatcctaaatttatacaccaaataatagagcttcaaaatacatgaagcagaaactggcagatttcaaaagagaaatagacaaattcacagttagttggagttcttgaaacctttcgataaaacaggtagacagtaaatatacggaagacttgaacaacgacagcagaatacacattattttcaagggcacataaaacattcactaagatcatgttcagcatcataaaacaactctcaataaatttattaatttgtttgtttgcttttatttgtagagatgtgttgctatgttgcccaggcttgtctgaaactcctggcctcaattgatcctcccacctcagcctcccaaagtgctgggattacaggtgtgagccaccatgtccagcctctcaataaatttaaaagaactgaaattgtacaaataatattctttgaccataatgaaatgaaattaaaaattagtagcaaaaatctctggaaactcactaaatgtgtagaaactaaagagcattctttaaaaaaaaattccatgggttaaggtagaaattacaagaataagtataaaatatttgtactaaataaaaattaatgcaagacttaaattagtggtaggcagctaaagcttagaagaaaatgtcaaacattagatgattaacattagaaaagtagaaagaacccaaatcaatgatctaaacttctaccttaataaactagaaaaaaaggacaaattaaacccaaagtacaagagaaaatagagaaaagattatagagaaatcaatcaaaacaaaacttattttattttttaagatggagtctcactctgttgcgaggctagagtgcagtggcatgatctcagctcactgcaaaccctgcccccctgggttcaagtgatttttgtgtctcagcctcctgagtagctgggattacaggcacctgccaccacacctggctaatttttgtatttttagtagagatggggtttcaccatgttggccaggctggttttgaactcccgacctcaaagtgatctgcccgccttggcctcccaaactgctgggattacaggcatgggccaccatgtctggctgcaaaagctttttttttgagaatatcaataaaattgataagcctctgaccagattcatcagagaggaaacaagaaagatataaattagcaataagagaattagagatgattactacaaatcatataggaatgaaaaggataataagcgaatattatgaacacctttttgtcaataaatttagcaacaggtcagatgaacaaatatcttaaaagacacaaagaataaaaactcactcaggatgaaatatataacctgaataacaatataactactaaataaattgaatttaaatttgaatttgaatgaattgaagctgattttgtactttaaagccttctcacaaagacaaccccagggccagatgactttgctggtgaattctaccaaatatttaagaaataatatcaattccatgctaattcttccagaaaacagaagaggaagttccactttcaaactcttttatgaagctagctttgctctgagacatacacatcacaagaatagaaaactacagaacaagatccctcataaatacaggtgcaaaaattatcaatgtacttacaaattgtaaaaacaaaaataaaatagatgtatttataaatatatatttatatataaattaaatatatatgtgtattgaaatatgtatgtataatgtgtgtgtatatatataaaagacatatatatatatatatatacatgagatacctcatgaccaagtggagtttatcctgggaattcaaaagggctggtttattgttggaaaatcagtgaaatgcatatatcaatgacacacaatcacctcaacatgtgtgaaaaagtcctttgacaaaatttaatgttcattcacaattttttaaattcttggcaaattaggaatagaaggaaacttccttaacccaataatgagcaactacaaaaatcttcagctaatattatggtttatggtaaattacggaatgctttcttcttaagattaagagcaaggcaaggatgtacactctcaccatcttattcaacagagtccaagaagtcccagctactgtaataaagcaaaaacaaaacagaaaaaaacaaaacaggcctatgctataagtatcagcttaacaaaatatgtgcatgatctctatgctgaaaattataaaatgctgaggaaataaaagacctaactaaatggcgagacatatcatattcatggattggaaaattcaatataataaagatgcaaattcacctcaaataggtctttaggtttaatataatttctatcaaaattctaagttttaaaatacacatagacaagcttattctaaaatttatatggcattttgggaggccgaggcgggtggatcactggaggtcaggagtttgaaatcagcctggctaacatggtgaaaccccatatctactaaaaatacaaaataattagccaggcatggtggtgggcacctataatcccagctactcgggaggctgaggcaggagaatcacttgaacccgggaggcagaggttgcagtgagtcaagatcgtgccactgcactccagcctgggagacagagcaagactccatctcaaaataaataaataaaataaaataaaatatatatggaaagacaccacccaaggatagctaaaacaacaaagaccaataaaatgagaggacacactctgatatttaaggtttacactttagctacagtaatcaagacagtacggtactggtggagggaaccacatcaatgaatggaatagattagagaacccagaaacagaccccacacaaatatgctcaaaactgatatttaacaaaggtacaaaggctattcaacagaagaaggatcatcttttcaacaaatggtattggagtaactggatatccataggcaagaaaatgaatatctacctaaatcccacactttacacaacactaactcaaaatgattatggagttattattgaactataaacttttagaaaaagacatgggagagaatcttcaggatctagggctagacaaagaattcttaaacttaataccaaaagcatgatccataaaaagaaaaatggataaattgaacctcatcaaaatttaaaatctttgttttaccaaaggccatgctaagagaatgaaaagatatggactgtaaaaaaatatttgcaagccatatgttcaacaaaaaataaactagtatctgaaatacataaagaattctcaaaactaaacagcaaaaagcaaacaaccgaattgaaatctgggccaaagacatgcacagagatttcactgaagaggatatacagagaacaaataaacacatggaaagttgtttaacatcattagccattaaggaaatgcaaattaaacccacaatgagatatcactaacacacctagcagaatgactaaaataaaaaatagcaataacacgattatcactatttacagagaaaatagatcactctgtattgatagtggaaatataaaatggtacagccaatctggaaaacagtttggtagtttcttgtgagattaaacacgcaatatgacccagcagctgaacacaaatggaaatgtatgttcatgaaaaaacctgtatgcatatgttcatagcagcctcatttgtaacaaccaaaaaagaaacaacccagatgaacttcagtgggtaaatggttggacaaactgtgatacatccataacatggaatacttctcaacaatggaaaggaacgaagcattgatttatgcaacaacttggatggatcacaagataattatgctgagtggatttcatcaaaattaaagagttttgttcttcaaaagaaactgttaagagaaggacaaatatcacatggtcttacttttatgtggaatcagaacaagttgaactcaaacaagtagagagtagaatggtggatacaagagagcagagcgggagaagtcactggggaagggagagatgttagtgaaagggtacaaagtttcatttgagaggaataagttccagtgatctattgcatagcacagtgactatagttaataatttatatttcaaaattactaaaagagtaaattttaaatgttctcaccataaagtgatgataagtatgtgaggtgttggatatgttaatcagcctgatttaatcattccataatgtgtacatgtatcaaaacatcacatttgaccccataaatatatacaattattatttgtcaattaaaaataaaattaaattcttttaaaaagaccaaaaggctgggcatggtggctcacacctgtaattccagcaccttgggtggctaggaggtcaaggctgaagtgggtcatgattgtgccactgcactccagcctgggcaacagagcaagaccctgtctcaaaaaaaaaaaaaaaaaaaaaagagagagagagaaaagaaagaatagcaccctgtttcccccaaaaagcactgttaagaaaaggcaaaggcaatccacaatttgggagaaaatatttgcaaaacataattgacaaacacttttattcataataaagacctcttacaattcattaataagaaaacaggcacccactttaaaatgtcctaaagatttcagaagacgcttcactaaaaacatatgtagatggcaaatgagcacataaaaagatgctcagcatcatttgtcagtaggtaattgcaaattaaaactgtaacctaatactattacacacccattggaatagctacaaattttttaactggccataaaatattggagaagatgtagagcaattgggactcttctacactgttgtaagaatgtaaaattatacaactgctttggtaaacagttgaatcttttttttttttttttttaagttaaccaagacctatcacaaaatccagtcattctacttctaggcatttatgcaagacaaatgaaagccttatccctataaaggcttactacacctgaacgtttacatcagttttatttttcatggacaaaaactggaaacaacgccaatgtccatcaccatgtgataaagaaacaaattttgatatttatttatttttttcatgaagcaatatgacctaaaattttggtatttcttaagaagccagattaaataatatagcacagactatgtagatttatctatataaatttctagaaaatgcaaatgaatctatagttacagagagaaaatggctgcatggggacggaggtggagagagaaaggaattatagtaagacatgaatcaacttttatatgtgatgaaaatattatcttgatgatggtgatattttcacagatgtcagcattcacagtatgtcagcatttatcaaattatatactttacatatgtgcagtttattgtatgccaagtataccttgataaatctcttttaaaattcctagaaggattgatcaggaaaaaaggggaaaccccacaaattgccagtatcagaaataaaggaggggtatcattatagatcctacagacatcaaaaggatcataaaatatattatgagagattctatgccaataaattcaactacttatatgaagtgggaaaattctttgaaaacacaatttacccaaactgacacaacttggaaaagatactcagattgttccagtatctattaaaattgaatttgtttttaaatcctttccacaaggaaatttcagcccagagtgttttactggtaaatactatcaaacactcaaagaagaaataatacaactcttacataaactctttcagaaaatggagaagaaaattgttctcaaatcatcttagaaagttagtataatctagataccaaaacctgaaaaagacattataagaaaattatagaccaatgtgcctcatgaagcagacacaaaaaatccctaagataacattagcaaattgaagtcagtgatatacaaaataataatacatcattattaagtgttttttccaaggaacagttaaaaatcaaccaatataactcaccatattaacaaaataagcaggcaaaacaatatgttcatttcaaaaaatacagaaaaagtgtctgacaaaattcagtgcccacttatgacaaattctcagcaaacttggacaagaagagaactttttcaaaaggataagggacatctatgaaaattctagtaaacatcatatttattgctgaaacatgaaaggcttttctcctaagattgggaacacggtaaggatgcctgaactcaccattcctcttcaccaatgcactgaaagtctagctagtgcaataaggcaagaaaaataagaagcatatagactgagaaaaaagaataatcctccctatacttaaaaatgactgcctacgtgaaaaaaaaagttaaagaatgtacaacaataacgattagaactaataggcacattaagcaaggtaataggatacaaactacatatatgaaattacatttttaattttagcagcaagtaattagaaatgaaattttaaaacaattccatttatagtagtatcaaagcccataaaatatttaggaataactttaaatatgtacaagccttatatgtagaaaagtagaacatatttctcagagaaattaaaaacctgaataaatggataaaaaccacatgtatgccttagagactcaatattgtttagatgcaaattcttcccagactgaacagatttctctagcttcaacacaattctaatccaaatatgaatagaatttttaaataaaattgacaaattgtttctaagatttaaatggaaatgcaaaaggcttagaatagttaaaaagaaaaaatactcaacctttaaaataaacaaccaagttggagaacttgaacttactggtttaaaaatatatcagaagctacagtaatcaaggtggcgtggaactgatggaatcatagacagatcaatggatcataatagataatccaaatatagacttagacatactcagttaactgattttttacagaagtatcacgccaagtgaggaaaaaaagcatcttttcagcaaatgggctagaaaaactaggaacatatatagaggaaagagtcttgactcctacttcacattacacagaaaaattaatttgagatggatggatcatagacctaacataagagctagaactctaaagctccttgcagaatacatgggaaaatatcttcatggacgtgaggtaagcaaagatttcttagaccccaaaagcactgatcacaaaaagaaatactaacaaattggcctcatcaaaataaaaaacttctgcttatcaaaagtcaacattaagaatatgaaaaggcaagccacagattgggagaaaatatttgcaatacatatgtctgacaaagaatttatacccagaatatttaaagagcccctacagttcaataataaaacaacataaacaacaacaacaaacagaaaaagacttggatagatatttcagaaaagaagatatacaaatggataaaaacatgtaaagttactcgatatcattagttatcagggaaatgcaaattaaaagcacaatgagataccatgtcatacctatcagaaagtttgaaattcaaaagattgatgatacctactgttggtgaaaacgtggagcaactggaactctcagacattgctggtgagagtgcaaaatggtgcagccactttggaaactttctagatttctttaaaagttaaacatacaactaccccatcacaaaacaatcccactcttacatgtttacttaaaagacaatgtatgtccacaaaaacaggcacaacccaatatctattaatagaagaatgaaaaattgttgtatatatttatatgatgatgtattactcagcattaaaacaaactgacatatgcaataatacggatgaatctcaaaactgtcatgttctataaataagtacatattctatgatgacatagttcagatcagagaagactgatctatgattatggaaattaggctagtccagtctagtgagtgtggactggaagaaccatgagggaactttccggagcaatggcaatgatatctatcttgattggggtagtgattacatggttatttgtgtcactcacaactcataaaattgtacacttatctgtgaattgactgtatgtaaatttcatctcaataaaaagttatgacatattgttatcacattgttgaaaacatattgttcaaccttcaattaacgtcatcacatcctcatatgccccatttaatgttccaaatttgctcctcaaaaaaatccacgacaaaatacgaaatagataataaggcaaaaaagctcagaggcttgtctgagctttgagtcctcctctaggacaatagctggaggagcaaaggcttcaggctggggagcaggcactggcacccccacagcaccacggacaggcacctcccttcctccactctggggatcttgtaactataaatggcaatcttgacaggcatgtgcaggggctagttggtcatgtcacctgctgtcttcaacagggacataaaaaccagggggaaccgcatgaggaagatcaaagcaaatgtgatgacacccccaactccatgtttcccagcctcctcttctgctcaggagactggggtgtttctgctgaagagggcaggcaggtcagggccatgccttggatcagacagacgtggactcaagggagggcaggttggcaaatcactcttaaaagttggaggagggtggttgattcagagaatgtcacgctagggtcagggggagctggagtcatgtcccaatgccactactaaccagctatgtgaccttggacacacagccgctctaagcttcagtctcctcctccataaaatgggaatgaaaggatgcctgctttgccaggtggttttgagcactcccaagtgatggtggggagaattcaacatgggctctgccattttactgaggattcactacaaactccatgagccctgggagccagggtcaagctgccaggtaagcacctggcacactgggcaagacatgagtctcactgctgtagggacaggactgaggcaaggaaaattgccacccccacgccacccacccgcacccaccttctcagactcccaccagtgcttcatgatgaagacctttgcacacaggttccccagatggatccagttagagaggctgagagcagtgtccatccatacccagtctatgacagctctcggctccaagaggaaaggctcaaggcagaacctggagcacagaggaccaccaggaggtcaccaggggacactggtccatccaatctgtccatgccatgtcatgtctccccatcctgtcacccaacccatccatcacctcatccatcccatcatgttccactccaccccaatgccttcaaaacccgatataccctatttatcccatccccatccacctcaggccccagccaccacagcgatcccatctgttcaccaccctttccacaaataatcacattctccagcaggccatgtgctaagtattcaggatatgtgggtgaagaaggaagacagaacattggagtaggatgacactgatgacctgcagggagccaggtatgatcgtggtaagtgttgcaaaggaagtcaccaggcagtggccgggtacgtcagcttgggggtttggggaaagcctttatgccaagacctgaaggatggcacagaggatgagacagaaccagctctgcagcagaagggtggaaggagctgctctcaggactgctggcccaggcagagaaagagcaggacaccgtccaggaacagagggcccctcttttctctctcttgtttctgtctctttctgtctctctctctctctctttctgcctctgtctctctctatatatgtgtgtgtgtatatatatatatatatatatcttttttctctctctgtatctgtctctgtttctctctgtctttctctatgtctgtctctttctgtgtatatgtatatatatgtatatatatatatttttttctctgtttctgtttctctgtctctgtctctatatgtgtgtatttcttttttctctctgtgtatctgtctgtttctttctgtctctctctgcctctgtctctatgtatatacgcgtgtgtgtgtgtgtgtgtgtgtgtatatatattcatatatatatatatatcttttttctcactctgtttctgtctctctctctgtctctctctctctctctctctcttcctgtcctttgacttggtctccaaggcctgttccaatgtctcctgactccagaaaaccctccagactttccctcccatccccaagcagagcagtcacccatttggcacaggcctcaggacccagagaccctgatggactctggcttggactgtggtctgctgttagtagatgtatgtcctgtctcttcagtggcattctcagtctcttgaggggtccagatgcctttgacacttctgtgagccctgagacacagaacaagacatgctccttgaaatccagagctggagggaaccctggctgtccccacggtcactgcatcccatctccagccactgagcacagactggagctgagggcattgtgaggcagtctggtctctctttccagccccatcctggctggcaaatatctcaggttcccagagtctttaatgacttctcaaggagacgaggagccctggacagggaggaggcagcagctgcagggcccctgagaagcccctgtagccagcttagcacagggcctgtcctttgcactgcagccccagcctgatttgtatccagctttccccttaattagtaggagcttttcagagaagcaataaaacaacaacatagcaacttggacggggcacagaaggcaagagccatttcggtaatggagtcggtggaattgctattctaaagagagagagtgaccactctctgcttttaagaaagctgagggcaatgctatcctgtcgtctgcctggttattaaggataactaatggctgcccctgcccccaacaacagaaggaaattgcagaaggaaattccatgaatccagagtcctgggcagtgattcccaggaaaccaaagtgctgagctcgacagtctggggggagctgcataggcccggggctcgtttgcttaccgtgaaggcctagtcagtacccaaagaggatgagggcaaagttgaacacgtccaccaggaacgtgaggacttaacctccagctggcctgcaggtgggtgaagttgtggaagaattggcagatggggtggtagacctggaaggtcctgaaggcagaggaggatgctgtgggccacccccaatttggacaattcctcacaaccagctggaaggttctaggaggatgccatagaggactccgtggtttgacagatggggaagctgaggatggcacatgtgtttatttttcccaagcttgtatttgcgaagagcactgaaggcaagtactctggtgttcagggaccgatcttcaggggaatgccgggcttctttctcacaacacctgaattcctcctaccatgagtgctgttgcacagcactaacccaaacacagacgctgcagggttagtccagtgcagctggggaagaacaggtaccaggtttatgtctccactgtgtgacattaagcaagttgctctgtttctaagcctcaggtttctcaccactgaatggcagtggtgagccctagcctgactatgtcatgggggggcattgaggggaaacgttggagtcaatgtgaagccaccttgggaataagaaagtgcaatgggcatgtgtgattatctccacagctgggcaaagaggatgggcaggtagggaggtgggtagattgggtgaatagggagtggatgggtgggtggatacatggaggagggtggagggatgggtgggtgaatggatgagtggatgggtgagtggatggatgggtaggtggtttgatgggcaggtaggtaggtggatggatagatgagtgggtaaacagatgggtatgtgggtgaatggatggacaagtggatgaatgggtgggtaggtaggtggatggaaaggtaggccatgaatggatgggtagatggatgggtgggtagatgcatggatgggtggatggatgagtgggtggatgggtgggtggatggatgggcgggtaggtggatgtgtaggtagatggtgggtaggtggatgtgtaggtagatggtaggtaggtggatggatgagtaggtggtttgatgggtgggtaggtaggtgcatggataaatgggtgggtaaatagatgggtagatgtgtggatggatgagtgggtaggtgggtgaatggatgggtggatgggtgagtggatggatgggtggataggtaggtggaatggaaggatggggtagtgaatgtatgggtatatggatgggtgggtagatggatgggtgggttgaaggatgggtggggggatggatgagtgcacgggtgaatgagtagataaagggatggatggaaataaggaaggaagcatagttagatcaagagatgatgactgaacacaaggaaaaaaggaaagataaaaaatggaaagagggttggttgggtaggtgcaaagattgttagttaggtggatgagtgattggactggcagataaaaggaaagaccaaagtatgaattgacaaatgcttgggcaaaagcatggatgaataaataatctcctgcagttctacagacagaccagggagagggcaaggatgtgtgctcttagaagtggcagatccaagtctaggatctgactcctgcatgagtgttcctcccaaggcccagctctaggccccaccatgtgtggatccaggggcacataatcccacattaaccatgcggccctccttatccatgccagctctacctgcagctaagagttggtctgtgaggaagggggaaaggcacccacctcacagccttcctctcccattccttctaatgaagtctcctaattactttttaatgacctgcttcctggctttctccagctgtttcttcagcatcccttggctgagttgcttttggctgaatgggaatttcctgagtaggctccatctcttcttggattctgggtcttggggaccccctggcaagacacaataatacaggtctcctccttgaccttttctcccagaagctattttagttgggagcactctgcccatctcctccactgattcccatccccatgaccagccccacgtgctttccaccagtgtctgagctcaggctgggggtttgctctgtcgtgtcccctgatcccaaggggccaggtctggagccccaggccagacaggagaaagcctggtggggtggggagcagcagggaggtctggggtgaggaggaagtatgtagtgggcctgggaacaatgaccagcagaccttctcccagtcccatcacttgggaaccccaatggcccacactttgccagattctgcagctggtttgagactatggggggctcctcctcaggggcctggggtccagaccaagtagggtataatctactctgcaatactcttcagcacacccagcggtgggctggcagttgcaaaggcagctcctaggagtaggggttctgctcagcctgtctcatgaggtggccacagcctggagccccttggctgctttttattgctttctgccctttttcttccccttgcaatgaacaggtcccaagccctagagaggcaaggcaggcagggaggagggggctgaggagtttccacccaccaccatggccacacagcctccccaaactcacactcggccagcaaaccagatggaggatatggggactggagaaggtgctggagtctctgcagagagcaggaggggaagcacaggagagagggtgggtgtggcttcctgaaggcagggagaaagcaggagagaggcaaaggagtataaaataaatccctggcaggaagatgaaaaagaaaggtttctagggaaggacaggcaaggtgatggggacaggtttctgcagagtgggacaagagcaggagcatgagaagacaacttgggggctccctgaagttgtggtgagaggcgagggagccggcacacagtggggctcactgctgaggaaggactgcagccatggctcagaactccagggaggttagccagggaacaagaaagtccgaaaccaaatgatttaaatttcactgaaaagaaagcacgctcaaacagaaggcagggcaagtaccactggaggcagaaccaggacgtcaaaattccattgtcagtctctgctgttgtgacatccctggccaaggaagaggctctagcagccacagggagtctcagtttccacatctggaaaacggaggcagttactatggccttggccaatcccctctcactttcatcagaaataagaaatgagcaaaggatgcctcctaggaaatggaatgagctttcacaacccccctgctctggggctggcgtcccttcctggtagagcggtgggtgaacagcacaagtaactgcaggagatcgcagaggacacagctgtccttcttctccattccaattatatttggcagggaaagtggcttttccccactgatgccagtgtatcattttgtggtccagggaaagaatccaaactgcaaaattatttgaccacgacagtggcctccagaaaggcaggagaaacagagagggaaagccgttgcaaacggtctgatgaacacgcacacacatgcgcgcacacacccataaagcaagtgaatgcctaggaagcgctcagtgtatgctaacgtgcgtcacaaatgtaagagactgttctggtcatcatcagaggctagagattaaaaggaaataaaacaccagaaaccaccgtgaatacataagctggccccatgtgacactgctgaaggctggccagcctttttaatttctttgagctattactccctttttaatttctcctgacatttgttgcctgctaaatcaatttgatacatggcaggcaggtgaagatggctctcccagcctaccccttctcatcggcgagtcgaggaatagtggttttaagagattgtctttttatgctgaaaatgctcaaaaatggctttgtttcctttggcaagaggaaaaggtcacccaaagtccccatcctttgaacactgatagattatcagacatcagggagagcagttttctgagccaagaaagtgaatgaccggatgcgtcatgttagacagtttctttaatgctatttttgggcgccaccccaggacagagaactgcttctgtttcaccagctcttatagtacaagttcttctgtcagataaatagcctcacgactcgtggggacccccttgggggctggctgttgatgctcctgtgtggaagctggttcacacagggagataacggaggagtaggcgcagaaagatgcctccggtcctggggagtgggcagtatcccccacatctgtcaaaagtaatcctggcagccaggatggaactggctgatggggaatctccctgtgtgatgcagaagagggttcaggagtgggctctcatctccaattctgccttggaccaatgcccttttggtttccttgtctgtaaaatttagggggttggtctagatgatctttaaggcactctccaatttgaccttctctaactctctttaaaaacctatttttactagtcaattggaactgagaaggagagccagccctctaagtacgagtgctacacatggagaagccacaaggtctatacctttggaatcccagcatgacttcatgactccaaataactcaattggcagggacaagttcagacactggcgtgtgtggttttctctaaagcaccccaaacgtggcacgtcatggagaaccatgctctgcagatgaaagctggagcttcaaaggcttgaggcaagaacaggcgagtcttaccctgagaaataactcggactctgtaggagttgggaatgacccttaggatgtcaccaggcaccatggggaagagggcctgggtagattagggatgtctgccatgagcacctgatggaagaagccacatgcaggccaaagggtatttccctttcctggtagaggaaatgtcaatgaacatggaggcaggagatgtgggcccttgtcaatgactcaggcatgtcattcccggcccatgttccctccctttgcagggcctggcctctctggaggcccctagggattgaaggatatgaagggggatggaaagttgtgtagaccctcccagatcaagccatccaaatgtgagatggtattaacagaaggtcaaattagaggaatagtttaaggggcatcaaattttattggactcagctctataagcagtcagtcaaaaccaatctgtttcatttatacttgggaggatctacttgtacacaaaaaaatgtaacaaggacttttaaaagtgcatttttccagtggattaaaattttctttataatgatgtttactgttttttttagaaaaaccaaaccaaacaaacaaacaaaaaaacccacaaatctttctttctagctcgtacagtcctgggatatcagagtttaaaaggaaccagaatggactctggccagctgcctcttcccctaggagtcttcagtgattctgaaggaggggacacagatctaggcggcttccctccctccctccccaaccacagctcttgggaggggaggggcagtgacaggagaggaaccatagttcatgctgacaggcttataaaaatgatgtggtgggagaaagaacccaatgactggtacttaactcttgctctaattaatttcgtagacaggctgtcttcaagtttgcaaatgtggcattggagtcagaaagagcaccagagctagtggtaaattatgtccaagatgcaaaaagaaaaaaaaaagataaaaacagaagcatgcattcccaaagtccactgtataagtatttgctacgtgtgaggcaggtggaagtacttgttatcacttcacctgacttgtgaaagctgacgcactcttgggagacaatgagaacagtaggagttgcattctctggttccaccaagtcaggtgttttgattctagcacctgacatgtggcagtgttgttgtataaagtcacctcaaagggtgtgggtggctgggatggtggtgggtggagtgtctcatctgctgccataatccactggcaggagctgggtcctggaggggtctccccttggtacctacctccatgtaatagatcgctgccatccaaaattgctttaagagccttgggactgaaagcattgcccacaggaaagataagatggcgagaacatcaagaggatggaagccaagagtgcgtgattcagaatgatcaccaaatagcagagcatctcagacttggacacggccatctggagcaaggcgaaggccagcttcaccaggcgtggcaggctcccatgaaccctgtccggctgctcagctcctcatcccgggacatgctgggggacgaagtgaccctgccgtgagtcccagaaagacaggcctacagccccagacaagaaataccaataggtaaaaataatcctagatttttttcaaactctacacagggagcaattttttactttcctggagcactcagccacaaggttttccatttaacaggcacgccctagaggcattttaaaaaaatatgtcatttgaaaaagaaaaaaaaaaaagctcaattgctcacaatttctctattgagtaaagtattttcaaacaagtaatcaaattcaaagaaccatttgctttgtattggagagtatatagcataaccccatttagcttaacttgctaatccaagtacaactatttgggcggctggattgaataagaaaaacatgctggtgcctaacctgggttacagatactccttgccttttaaggcacagatcactagctggcaacttcttgaagggcgcttttctgctggagctgctggtctttttgactctccgaataggtgaggtataacaggtgggatgcggtggctgtcaagggaccacttggacttaccagcccactgtctgcaagggaagctacccatccaggcatccttcctggggcagggtccttctcctctccctgcttatgcctttgcccctcctggctggcccacaccaactgtgcattaccatctctctgacctccctagaccgttaagacatcattttttaaaaccttcaatgaccaactgattacatttgcatcaaagggcgttctacatgttttttaaaagacctcatgaattttgattccagactcttcccatctggaattcacaatcacttgggatggtctgagatttattcttgcatgatcaatgaagactgcattgatttcacaagtctaccagcaaacaccaaaaatctgctgcgttctagaccttgaactagactgcagagacacaaagagggttcccacaccctctttcctcacagggctcacaggtcagggaaggcacagaagccccagtgaaaggcaggacccagggcacagtacctggggcagagtcacgtctaaggtggcatggaagttgagaggcttcctggagatgaggctggggtaggtcttggaggatgaggggaaaccattctgatatggtttggctgtgtggccacccaaatctcatctagaattgtaactcccacaactcccacaggtcatgggagggacccagtgggaggtaattgaatcatgggggccggtctttcttgtgctgttctcatgacagtgaataagtctcatgagacctgatggttttttaaagaggagttcccctacacaagctcactctctttgcctgtcgccatccatgtaagatgggacttgctcctccttgctttccaacatgaggcttccccagccatgaggaacagtaagtccattaaacctctttcttttgtaaattgcccagtcttgggtatgtctttatcagcagcatgaaaatggactaattcaccctcccactagagaagcctggtgaatggacatcctcggcacactttgtatcttgtgcaattcaaagagcatggggcttggggaatggaaagcccatcagatcacaaaggacctcattggctgggctgaggtgttctcatccttcgtgacctgatttcattcttccagaggtaggacagctaagagttaagggcaggtatgggaagaatcggggccaatttaaagagcgaattgggttgaggagaggctggagccagtggagagtcactgagagatccgagaagcgacaacaatactctgactcagggccacagtgggcacaggcctgaaacccagagactttcccaaaatagtccccagcatgcagcatcccctggacatggtgggtaagggaaaaaaaagaaagtaacgacatcacctgggattccacaccaggaaccacatggctggtgaagactttctatgagatttggaataaggctgttgatgggcaaagaccacagagcacagagggagccggttccaggggcgagaggaagtcatgtgcctgggtcttgcagggtgagagagagctcctgagcaggtggaaatgctggcctgatgcttaggacacatgcagaggaagaaccaagagaaagtggcgtccagaatccagggcaccgagatccaggaaggtggtgggagcctcggcaaagagaccaaatagaaggaatttgcaaggagatgggcacgggctcacccctggtaggcagagtggtctcattatcagtctgtgctagaccaaatagggaaaggctggtgtggaaattaagcataaggcttcagctgcccttcgaccctttgaagaagtttggtggtgaggcatggggtaagcgtgtgactcgctgaggcctgtgaagaccccagcctgctgggtcacaggaaggaatggaagagcagggctggaaaacagaatcaacacagcagcagcactcaggggagcagagcaggaatgagggaggccccggaccaggggaaggggacccggcctcgaggtgagaatccactgctcatgggagacaggggaaagggtcaagatggcaggcctggggaagaggattcgggaacattcatgttcctctgtagcttctattcctgctgggatggaagagcgggtggggtcggggagagtggggaggggctcaggtttggattgacagcatgggaacagcaaaggtgacgcccaggtcccagcaaaagcgtatctgagtggcactgagaccctccagtctgcaggggtgccagtggacaggcagaggtagctgccatggctactcacgactgtgtccacagcaagcggacgtccacacccacagggatacccaggcctgggaatatggcagcggggtaatctcagccctccatttcctcttgtgtccaaacggggataatcttactaccctcctcacagggttactgaggtggttaaggaagtttatccacacaaagccactcaggagcatgtctggcagatggaaagagctggaaacaagcccttgttaccactctgatgggagcagcccctcctgcatccgtctcctcagcataccatgggcaccaggctgtcatcccaagggtcctgtcatccttgttcccaccccgcggtgacaaggacagggcctacccatgctcaagaatgcagccacatttgaatttatggatgggcccaggacgaggcctcctagaatttctcgccaggtctccctcccgccctggcactcctattacatgtcttcatgaggcctgcatcatttacccctcccaggggactttattagagggacacatttacaaagtcacagttcccatttggtcacttaaattgcacaggaaaaggggccctgtcaacttcaactggggccgcctctgacttctctaaaagccagatttcgcacaagaggaaattacttctgtacctgccgtgggccgttgttattcaactcggagtataatttcatagcattagcaaaaatgattccttttatagctctataaatgtccttggcccacaaaatgcagtcttgaccttcagagagactgagttttcagggggtgcccttttcacgtggggttgttccggggcagggagcctttttggggctgaggacggtgcgctatcaccattgaggagggcaacctgtcatccacctccttcttggggggtgtccaggctgaagttgtgcgtgtttctgcgtggatctttacagccatggcttctcctctttcctcagccagttgggtatcttctggccactgctctcaggacttgggtaaccctctgctgcccggctgcggctcctatcccttttccctgttggctggggctgctcgtgcggtctcttgcaatggggcatggcggtatctcagaatgctctgtctagtggccttccttccctggagagaaatgtctgatctttattatagtaagaaaaagaaaaaggagggaagcaaagaaggacaaggagagaaggaagggaaaaatcagcgggggttctacttccattacagggaactgaccacacgcaattgtttgcaatttgcatctcaagtggccacctaggatcaccaaggggatctcctgctgtcatcccaaagacctccccgggaactctggacacaggtggctgagcacagtgactctctgcgggcttcactgggaacatgccgggtgtgtggccaggagggagggtgggagcagtcaaggccttcagcagccattgccaggagctaatgcaagacataaatcatctgtcagcttacaaagtgactttcaaagttgtcggaatggaataattaaaagaaattgatatcgtaagagaaagccgtccctgccatggccaagcttgccttactgacagctcaccgccacacacgttgctccgccctccgggccaccacaaacggctgctgtctctgcttggtgcaccccaggcctcggtgaccttcctgaacacccaggagaaccaggccatggcaaggagcctctgggctgtgccttctttggggaaagagcaagaaccctctgacgaggtgacttaatggctcatcagctttccaccgtcggcgacagaaagctggccacagtgatccgagagacagctgatgaaatgccaccaacaccatcactgtttctttctgttaacttgccacacagagccaaaaccaacaaaaatccaaccagcacaccagataagtattgaggcgctgctatgggggccctgctaggaggatttccctggactcaacgggttcctgtccaaggtaggaactgtggatgaagaagatgggttccaggggtggagtggggagaagagacccttttcgtctctgagccccctacccagcctccacccctcctgtagggggagaggttggtggggtaaggtttgcattataaatagctgatgtttattaagcacttattatgcactacgcccactgtggttttatcttggagcaattctctccgttaggtcctttcattatccttcttcgccgatggagaactgagatccagagagtttaactaactcacccaagatcacatcagctactggggtggaagtaggagctgatcccagaccaacttgctcaggaagaaaggtcatttgaaatcacggacggagggaatcctggaagagctgcccagcaaacggggaggaggaatctggggttgtgggggagggggggggggtctgaggtgctgtcacagttcacatcctggctccagcactttcctgctgagggcccttgagcaagttgtgtgacctcccgatcactatctttaactgggaatcagtgttaaggggtgtcagattcatgcctggcttgcccagtaagccctgatgaacactggccatggactggttcctacaaccgggtgtgaacacgcgcctctcaaccccagggagacagcccagtcagcgttctttctcatgagcttccaagtgtagaaagcatttgtgggccaggggccactctagcccctaaactctaccttcccccagaaacgaagattctatgtcacatcaaaaagggctgaagccacagggtcccatagagagccacgtctctcctgcttcacctcggaaacgtggcagaaagtgtaaacgccattggaaagtctggcagcgtcttatttagagcttggttctattttgtgtttacatctgtgagctgcctctacccatttgcatccctgcccaagcttgccggagtgtctgcactgacctggtcacattttttttttttccctggtaggttttctcctgtgttggatatggtagagcctccgtacataccaggttcatctgaattctcagcctcagctgcggtcacgcgcatcaccagcttctcacctcccaaatcacaccaaagaagaataaaataggcatccatcggaaattcccgtctgctttcgacacacatttttgtaaatgttcgttacatcctagtaggggtgagtgtgtgtctaaggcaggcatgttgatggggttggggaagttatggcccaccttaaacgtaataaccttgcgcagttctttgggggctgcgagtacactacaggcatgaatgttcagtcacctgatcttcattccagacgctaggaaaagcaggccggtgtaaggaagaaagcctttcaaatttgtattggctcctatttagtatttgtcagggtccagggctgcactccagtgaacgcctcacttaggaaagattggacactcgacagaccacatatttatctcgctctctgtcggtcagtgcgttccaaagcccaagccgttatggaaaacaggctcggaaaaatgcatatttcccccaacatctcagactaacaagctgccccttcagcaaatatcctattgccccagccacggggatcaccttcatgatgccccctccccatcagagcgtataaaagagtccctatgcttcccataggcctcatgacctcatctctcctgcacagtccacttggtgttaatgggcccagtcaaaaggcaggactgttggacgccagtgttccttattcgaccatctgtcgatcaaagtgaccacacaaaccccgctttgccgtcgcagtacctccacagcaacgccacggttctccctcttcctctcacacgcttctccccatcccacctgggtcctgccgcctcctcccgagagcaaacgtggagctatttgtccaagcgtcatatgcgagccgcaggagacgctcataaatccctgccctgttctctggcagtttcagacgttgtcgggcccagaccctccttttctttcttaaaggtcacaaaatctaattagaaccattgctaactgtatattctcgttgtcggtaagccttaaataataaaaatcagaccaaatgagactaagcaagggagatggaaaatcgatgtcatatttgttccaagtaatttcccttcagaagagaaaaggctcttaggactggtttgtgaatttaaaagatgtttaaagttgcatctaggcatcggaacatcaaagtcaaccccaaacagaatttcgctggatgatctctccttattcccggaaaagtcagtgctgtttggtagaagggcctaagacggggtgacagccttcctcttcctgtctgttttaagcagttgtggctttgccaaaaataaaaataatttctttgaaaaaccgatcccttaaggagcaaagagtaataacatacgaggttcttttcccttacttcactatttttctgcatactttcaactaaaatgcacacttaagaaaaaaacctaaataataagaatgcaacccgcacacactcacacatgcatagtgaggacgaggaatgaactgcccctggaaatgcttatctttttgcctgaaataccccaaaaaggttgattaacatctccagataagcacttctgtttccacacctttgggttttacatgtgtccatgacaatgggagcgatttatgccaagaaaattggttgacctgtgttatggttaatactgagtgtcaacttgattggattgaaggatataaagtattgatcctgggtgtgtctgtgagggtgttgccaaaggagattaacatttgagtcagagggctgggaaaggcagacccaaacttaattgggtgggcaccatctaatcaggtgccaccgaatagaaagcaggcagaaaaatgtgaaaaggagggactggcctaggctcccagcctacatctttctcctgtgctagatgcttcctgccctcaaacatcagactccgagttcttcagttttgagatttggactggctctccttgctcctcaagcttgcagacagcctattgtgggatcttgtaatcatgtaaattaatatttaataaactcccctatatatattatatataatatatatacacacacatatacactcatataaatatataaactcgtatatatatatataaactcatatatatatctcctatcagttctgtccctccacaggatcctgactaataaagattttggtactgggaatggggaagctatttcttctggcaaaaaaggttcatcagagtttacaaactcagtgttctcagcttcatcagggtcctcccacatgtccccattccaagttgcagggttctgttcttttccaatcaatgccctcactttaacagtagacacctggcgaggctgtgcatccacttttctttgcgggtcagccactcgcatagtaagagcttgtgtctgtttttccacaatttcagctctttctctataggaaataagactctcactcagggcaatcttcgcagattcaaggctcaggatccgctgctgaagctgggagacagaatccctgagttcatcattttctttcatcactttgtccactggacttaagagcaaccaaccagcttggttctccacatatggtcaaaggtattatgtatagagtcactaaactccttgacaatgaggagcggtcaatcaggggtgttaaatgcatttattttgcataattctctaaacagttcatgccaaggactgtcagtgttctccatactattagaagtagagtccttagcatttttgggtctaatcatattaagcagccaactccagaaacctcaaaaccaatgaaagaactctatccttaatattctgttcctctagaaccactcccagaaccaaaatctgtattagtcacggttctctagagggaaagaactagtaggatatatatttaaagcggggagaagcttttgcttctaatggtctttgtggacttgcacgccaagcatgagccactgcttgcttccttgctgcagtccccactgtgtaaggtggcagacattttctgaagaatgggctgatcttggggaaccctggaactgagaagagccagtgggcccaactggctcccatacttggacttctgaagggctgtgctcctggcagctgagtagctgagtagaggccccccttatggcccacttaccagaaggatgtgtcacccaaggctgacaccattttatctcgtcttcattttctatcatggtgagatcatgtagacagagacaaaacctgaaatctatcagccatcaccaccctggaccaggttggggtcattcaaaaaagaggctgggctaaaatttactcagcttctgaagaaaccagaaccagctccttgagtgtttatgaactccccctgccctcatccaaccttacaaaatggtttgtttgggcaaattaattagtgcaaataaaatttgaaaaggaaatgcataaacaacctaaaataatatgctgattttgagagtgttcaggctaataagcccttttttttttctgttttgagaagattccccacagaggcaccactgagcattgctttggaagaccagttctaatggttttgtgaacttgatagtactaaaatggaatatcttttcttaaaagcaccataattcagtcttgtcactaattcagacagtgcgtcccccaattaggaaggttaaactatgtatcacacccttcacataaattgccaggtaaaacagaatcatcagagtggttgagagccaagtgatgacatgattttcttcaacttgttcaactaaggaaagagaaaacctagtccgctttaaaaggaacaattttagaaagatatttattttgaaaacaacaaaaactgaaacatccttcttcttgagccacttggccctttgggggagtcatgctttctgaaaatctcaaaactgaagggcagaaatgtcatttaaaataaataacctaaccatttcccccaaaccagggtccaatcaaaaagaacacttcttgaccagggggattttattttgctgctgggggaaggtccttcctgcaactttggattgaattcagaatttcaactcaaagcacgattccaaatctaagctctttaaatgcgccagacaaaaaggcacttccattataccacagttctgaggggagaaattcattttcttgttggctcccagtgtagcagagggatcagtttagtgtccctgtttcaagaccactgggagcaggtcacctccatgatcccatggtaacagcatctcaccttttatgaaggcccttctctcagcttcctttctgggcaggtagctcgtgctaacggccaaatcgtcagaactcctgcaggctctctgcaaagcagcaattttcttttgctttgctttgattttctccatcctggcaattgaagacaaacagagaaagccattttcttctccaccagtcaaaacgcctttgccattttgttggtttcagtgcttgcctttttccctaaaaccgaggctgaggaagagatgcccaaagttatgctcccaagtttcccttagttcagaggggcctcatcaacactcagtccccaacagctaacagctcacgtagcaacatggacaggattctgctctaggtgccgcagaggactcaatggtgacagccatgggggacagctgacccctctctggctgagaagatgggacaggagttactatacagatggagtttgccaatgtcaggtgaccacagtgcagatgagggtctggggctggggaggtcttggcaggctcagacagtttgggaattcagacttgagcaggcaaccaaatagcacttcatcaatttcagtcattatgcatgccataatttctccagtattatttgatttccatagttgattttcagtcaattcaattttaaacttagtttcattctgagctataatatccttgaaatcacctactggatagtctagatacttcccgctaaattgcgctttttatttattttttatttatttattttttggggggacagagcctcactctgttgcccaggctggagtgcagtggtgcgatctcagctcactgcaacctccacctcccaagttcaagcaattctcctgcctcagcctcctgagtagctagaattgcaggtgcgtgccaccaagcccagctaatttttgtatttttagtagagacggggtttcaccatgttagtcaggctggtcccgaactcctgactttgtgatccgcccacctcggcctcccaaagtgctgggattccaggcgtgagccaccgcgccaggcctgaattgcgttttttagtgtaaccattaagcgaaaactacgtttctctgtatacccactaaagccttcctgggaagcatctgggatgtgtgcctcatagcacattgagagacagagcatggtcttgactaagtagggttttgggtagcccattttagcaagggacagactcagacccaggaaggcatgtggcctaaagcagagcatctgagctgtcaagagcttaagcatcacttcctcatctaagaattacatcaggagatggttcctcccaggagaagcccatgttctcatcacactcaagagctctgcctttgttctccgagctagaagaatcagcccacaatttcgccacctccatccgctgattgacccacatttagagctcattagtgctccacactcccaaccctggaacatcctcagtcttattgtagactcctcctcttggtgaaactcaaaaataagagaaagggggaaccctatatcaaagaaagaaacaggcaagaagaaggtggcagatcctttggaaggaatatgcttccaggataaaaacaaagaaaagccagcttgactgtttcatgacaatcagtggggatttttcttatcttcatagtgctccaatgcctgacttagggtctctgcttcaatagcttagcactcctgtttgtacaataaaatacgttttgaaaagtcatcttagcctaggtaacatttttgtgtgaattctgctagtaaaaagtcactaccaatttttgcactaagatgaattgtatcgatcatttcacataacaagacaggtctagctggctgctcacagatatccatccttttcttcttttctccccaaagagcatgaacctccagagcataatgaccaggttttgctcaacagatggaggacagaacactcaacagactccgcaagtttacaaccagcctgaaaactggacgtgcttaggcaggatcttagggtgagaagctgttgagtttgagggcacacaatttgatcagtggcatatctgaattcaggaatatggtctgaattgctgaaatggatggcataattccattgaaattgaacttgtcccttccctttggtgcagggttaaaatgcaacatgaggtccaactctagggagcagataccatcaattaaagagaactgcccagggctgttggatgatcagtttagtatcagatgaggaatttgtcaccagaaggggctatcaggcaagccagtcttgcagacattcaaatgaggagagaagcctgagctgggatgggggtggagattgcatagagaggtgatcccttggatctcgggcagggttggttgacctgcagattctgaggaacttggccaggttcacccttgactctgagctgcccttggttcctcactgccattgggtcaatgccacttccccacaggtctttgcctgcacccttccactgtgtttacaactcagtgtggccccaggtctcacggtcctacacaattagagtcccacaaaggggcaaccagaactgagtcccaaactcaggacaaagctgtgtgtggtggaagggctctgtgaggagggatggcagtcagccctcttctgccccgagccagcagagcagccccaggcgggtgactcgttttgagcctcagctcttcctctgtccagaggagggatgggatcaggtggtctgaggtttctgagctttctaagttgtcattgcagtccagcatcattcccttgaaattgaatctgtcccttccctttggtgcagggttaaaatgcagcatgaggtccaactctagggagttgcttccatcaattaaagagaacagcccagggctgttggatgatcagtttagtatcagatgaggaattagtcactagaaggggctgtcaggcaagccggtcatgcagtcattcaaatgaggagagaagcctgtcccaccctgtcaatcagccgcctgtttatgcctgttccctttgggacaggacactcttggagcccctgaaatctgaggtctttgtccctaggtctcctggtgcctgtacgctgaggctttggtggcctccggattggcgaccacatacaggtgggaataactcaggaagctctgtcgctggacttgcagaacagtgaaacacttagcctcccaaaggactccctcttccttctcttcgggttcatggattttgtcctcagggatagctgcatggaagacaggagaagccaagaaccccaggccagagcctagcatgggtcgcgtctctggatggaaggggtcagttccagtttggacagaccctgcttcacttccttttggactgttctgtcctttgctcatcttccctctcccctttccgcccaaatggctgattttctagggaaacaagcagataaggtcagagctggggaaatgtacccagtcctccctgctcccccatcagcaccggcccctccctggagcctgagcccacccccgtaccaggttccctgaggtgagtcctgctgaaagccactgcgtggccttccctttggggtaaacaggcggctgattgacagggtgggacaggtaacttgtggcactgtagattcttccatttcagcagctcaatgtggtgcatggaaacctactccccgtggcccagcgctaagccccagacttgtctgtgaaagatgagagctgtgtcttcacatattttcttgacaaactaaaagaaagagaatgagagcctaacccaagatgtcactcagagacaagagtgaaaataaatacatttccccttttccttcattcataaaaggaagccagttacagctctagtcgggcagaactcagggctcctccctctctaaacaggccagaatcccggtcattagtggtggggttgaagtttagcaaactccacagaagcacccgtggcacacagtgggattatccccaaagcctagaagccgctgactgcagggcgccactgcccttgacctgacatgtggtgttgaggcagagccttggatgttccatcccctcttttcctctcggtttggtccctgagtttcccctggagggaatggacgtcctccagggtttggtccctgagttttccccggagagaatggacatcctccaggtcccaccagggcttttctcagtggctcttcagaggacagtctggcaaaacagtcaaatgcagcacgtgagctttgattggactctgattctaaaaatagtaagagctgcaatcaaccatttggagcaactggaggcactggaacgcagaccgggtattagaagatatcagggaattagagtcatcttcttagggtggactgataatgtggtgggtatataggagaatggcttgatgtctgcctctttgttttcagagatatctcaaaaatactcatgcacacagacgcacgtgcacacacacaaatatagataaagcaaaggtggctaaataaacagctgttaatctaggggtgggtatgcgggtgatcactgtactatgctttcaactttgctccatgccaactgtccctggggtcatgcctgcactgtgctggcaaacattctgggtgcttacccagaactgatccccttcactgtgcagtttaagcccaaactgtaaacaagccagcagtgggagacaagtaaaacctctaggtactcacgcatagtgactggccacagaggagaagtgtggggaggactcaccattgccttcatctgcagtgcccccacagtttgccctccacaactggtgtcatctttttttttttttttttaaatggagtctcgctcttattgcccaggctggagtgcaacagcacaatctcggctcactgcaacctccgcctcccgggttcaagggtacctcctgcctcagcctcccaagtaggtgggattacaggtgcacaccaccatgcccagctaatttttgtatttttagtagatacggggtttcaccatgttgatcaggctggtcgtgaactcctgacctcagatgatctgcccgcctctgcctcccaaagtgctgggactacaggcgtgagacactgcgcccaaccagtgtcatctttcatttgtctctttagttgtctcctcaagggtactagtcactcagtagagtaccatttggttgggcagccaaagagatccaattatactcttccccaggaacctaaagtggatttaaccaggaagccatagaagaatcttctatgttgctaaggactgagcacaggaaattgagcagccacacacaaccatggggccaagaccaagcccttgcctttctctcatcctccatgctgtcatctgcaaagtcactacatcatctctgaagcctccttccctctcatggtctgtgtttttcgtcaagaaagacttactggccattaggaggatgaagtcctaagatgtattacactagaggacactgtggtagctccacccagggagatgagatatgatgaattggtaacacgaatgtcaccattacaataaaagctagtttatccgacaggcaatcactcggaagccaatgaggaccaagattctgaataatgatctgcggctttgagttgtccaaaaaatgactgcattatgctgagtggagtttaacgaacagccaagttggaagttcatgcatggggcacagcagattaaacagtaaaaacaagcactgggggtctggagatgggtcagtggcttgcaggccagctgacagcactgggctggtctcttatttctctgtcttcatctaccatgtgaaattttgagttttaccaacccaagatggcagtagggagtcggggagaaggaagaaccaaataatctcttgaggccccttccaggtttcagactcatgagttctccattcttcaaactgttagattaatcaacttttctctgcattattttaatatgactgctctttgaaatatatggtacattctgttaccacgaatgaacaccagattcatcaggggatcgtctctaggttactagtgagtttataaaacattctttctattggggttcctcttttttttacctcttgatttcctttaaatgtagagctcttcaacatcaaaagctgctccaaaaagcccaggctgcatcatgcatgacatatgggggatcattttacattttccacctttggtaaacatggctttgaaaaaggccttttaagatgactgttggttttggcagtgccttttcttggggtattaagacagtcaggctaggaaaacaaagagcagtcttgaaagaaagcctcccataccgaaaggagagtcttcacagcaaccaccagcaccgagcaggcaatcaggcagtccagtggctggagaatgaacttcacgggcttcaagaggaggtggcctccatgcagcatgaggtatccaaaggccaccaggtacccagcccctgaggtgttgatccatgtcattcccacaagaaaaaacagccagagcacacatccaaaatgataccaaaaaacaacaactttcaccatgtccaagtaggatctgaaaggttgaagagcgaggaaaaagtaaagatgctgtcacttgacagagggacaaaagcatatcttctgcagggcaccttaaaatatcttcaataaacatgtaaaaccgaggcggtgggagaaatgcagcgagcaggagaccctcagaggctcttagcaaagctggtgctgcccgtgagggcagggtattatgtagagtcaggttcatcgaggtgtaacttgcatatcgtcaaaatctcccttattaggtgtgtagttctttgaattttgacaaatgcatacagtcctgtagccaccactacagttgagatcctgaatatttccattatttccaaagtttcccgggctcctttgcagtccccatccctccaggcaaccactgatctcttttctgtccctacagttttgccttttgcaaaatatcacggaaatggcatgatacagtatgtcacctttggtgtctggcataacgcttttcagagtcatccacgttatctacgtagtgcctatagttccatgctttttattgctcagccatatcccttgcacggacgcaccacaatttatccaaccgccgggtaatgaataagtgggttgtctccagtttttggtgattatgaataaagctaccgtgaacattcatgtccaggttgttgtatggaactaagtttccatttcgtttgggtaaatatataggaggggaatggctgtgtcatagggtaagtatacattcaactttataagaaactgccaccgttttccaaagtggctgtgccattttgcattcctaccagcaatgagtgagaattcctgttgctctgcatttttccagcacttggtattaccagggggttttggtttgttattttaatcttaaccattctgataagtgtgtagtggtatttcgttttaacttttaatttccatttccctgataactaatgctgttaagtatcttttcaaaacatgcttaatatcttattatcttttttgattatttaaatcttttgcctattttaaaaaatgagttgttttctttcattgagctataaaagtttgcatatattctggatacaggtactatatcagacactggttttgcaaatattttctcccagtctgtgatttatcctttcatgatcttgatagtgtcttttgaaaaacatgttttgtgttttttggatgaatatcgataatcaactttttcctgttatagcacatgatttttctgtgtcctattaaaagaaatattctccccacccaaggtcatgaaaagcttttcccatttttatagaagttttatagttctgggttttacatttaggtctacaatccatttcgagctgatctttgtatatgatgtaagatctggattaaggcattttgtgttttaggttttttttggtggggtggctgggttatggacatacaattgttccagcagcatcagttgaaaagactattttttctgaactctctgcaccattgatcttgaacactgcttagtacataacaaatgctcaataaaattgctgactgcatgaatgcgtggtgagcccatgccaggacccagtcaacacatacatgtgacttggagaggagacattcagaaagttgttggtgcggtggctcatgcctgtaatcccagcacttttggaggctaaggcaggcggatcacctgaggtcagaagttcgagaccatcctgagcaacatttagtctctactaaaaatacaaaaaattagcctggcatggtggtgcatgcctgtaatcccagctactcgggaggctgaagcgggagaattgcttgaacccgggaggtggaggttgcagtgtgccaagatcaggccattgcactccagcctgggcaataagagcaaaactctgtctcaaaaaaaaaaaaagatggcatggcttctttgaaaaacaatttggcagcttcttaaaacactaaagtaaaggtgcattcaccctatgacccattgactccatgcttaggtttttatccagaggaacagatatatttccacaaaaaccctatgcaaaaatgtttgtgaaaggtttatgcatattagctcaaaactagaaacagaatcgatgtttatcaactcatgagtggatcatcaaaatgtggtataatccctgggagaagaattaactaggaagaggagataagaaaatgtctgggatgatggaaatcatctgtgccttgatgtgtctccatcaaagttgactatcacacttaagatctgaatgtttcactgtatataaattatacttcaattttatatttttaaaattaaaaaagaaaattatcatgatttcttctccaaaagcagcaattcttgggctcaccatgctgaaagggagcaacgactgcctacccacagagggcctgagaccaggacatcagctcttacggcagaaaataaagttaggaatagggctgagctgggcgaggtcttctggcctcagctctctgctgatccccacgatgtacctgcctgcatcctcactacactctgttcgcatctacaaacacctgccactgcagggaggctaccaggagaagaagaaactcaactgtaaagatgcaaggagggctcatggtccctggccatggctgccctgccccacggttttgggcacacaaaggaggacctcacccagtggccataccataaggggccacagtgcagggaaggcccccgggactagcaaggccatatgctcagggaccaagttcatcctttcacatcacttggctgcctcccttgtcaccatctccttggtaaaggaggtagcacaaggatgcggtttgagtttccagaaggcacctcctggagcctccttactcagctcagagtatgaccccagagctgcaggcagaggactcactcgtccatgtggagcgtcagtggagtttagggttccctggcaggtgctctctttacccttccaaacccttgaagacctgggtcaggtgaaacgcaaactctacccagcagagattttgccatcttctctctgccgtgtctccatgctcagggcagtgctcgggcacatagtttggatctatcagcatttgatgaatgaatgaataaataaatagcggattttgcgtgtgacagaatgcaaggaaaaggcaagaactgggagaaggaaatgaaaacttttgactatttctaccattcatagttatattttctcctatagaactccatctgttttcaagaagatggatattttctaggctgactgagaagggcaaaccctaaaaggagactgcttacctttggataggtaatcactatctccccaaatccatattttggaaagtctttattcgagatgccatttggaaatcttatttgcaaatcagccatctactttttatttagtatcttactaaatatctggattttaaatcatctatcgaaagtacccctccccacttcaccccatcagaataatgcttatgaattaaaattctctccgacacaaacattttttaattagatggagaccttggaacctggtaactatatttcttccctgagtactgtgtgggtgattacaagaagatgaaatggagaatatcggaaagaagattggcaaagaagggaagctgagatggcacttggcatgtcctaagttctcaattgcctgcccaatctgaagttcccaatgtgaagaggcactcagacaccctcggtactcacagagtaacaaattggcatccggcttcctggcaaaaatctgggagatacaaccacttactgagatttgagtgtctttctgtactagtggttctctgcaaaggaaggagtgatttttttttttttttttttttttttttttttttttttttttttttttgagacagagtcttgctttgtcgcccaggctggagtgcagtggcgcgatctcggctccctgaaagctctgcctcctcggttcacaccattctcctgcctcagcctcccgagtagctgggactacaggtgcccgctaccacacccagctaactttttgtattttttagtagagacgggatttcaccgtgttagccaggatggtcttgatctcctgaccttgtgatctgcctgccttggcctcccaaagtgctgggattataggcgtgagccactgtgcctagccttgtcttcattatttttctaaagaccattgagtctatgttctgttaatgcttctttcaaattatatggaatgatgatgatgaggatgttggtgatgataatttcagggtcaagggacgaactctcttttacaaagttgaaaggatgctagaaactgcttcagaaagcctgacagctggctcatctggggaaccatgatcctgcccaccccacgatatgtggcgtatttcatggagacacctgcccagcctgcacatcatactggggatcagttgcacacctggggtgcagcccgtgctcctttccttgtcagcctcagcttccccatttgtacaatgggagtgttggtgtctgatttaactgaatggggttgctatagggtgatctgcaggtggcaaacccaggtggcatctccacgttgggaattgggaggcgggggctgagcaaggctgtaagggatgagagaaaccacgtgcagggggagtgctaaagatttcagcaccaagctgggagaaaaagagggtgagaggagagaaggtaggaagtaggagagtgtgactgtccacaaagagaaggcaaaaaaaggagaagaggagagaacaagagaaagaaaatgagaagggagagctggtgagtaacagagcgagccagaaacaagaaacagagaaaatcacagagagagagagaaagaagaaaaaagaggaggcttggaaagaatagaagaggggaatagagggtagagtggaaggaggaaagagagagaagtggtgggaaaaggaggaggaagaggaagaaaaggagagcaatgaaaagccaaagaaattcagtgaggaaacctaatgcagacagtagagatgatcttaggaaaagccctaagcagaacagctgtgtgtgctgggagataggacttaagatgaaaatagaggttgttaatttgactcagggtaagtttttgaatctttactgtgttgagataagaccatcccaggaaaagactacccagtcgaagtctgcggacccaggccttctttggcttctgccaccaagagctgtgtgaccctagttacaaggcagcaaaacccccagcacagcccctgatgtgcagcctgtgctcctttccttggcagcctcagcttccccatctgtacaacgggagtgctggtgtctggtttaacctaataggactgctataaggaaaaagtgtgaaatgcttggaaagctaagagtgtacacgagtggaagggggcatcgttcttcctatttcctgctcttttcattttttatttgcattttagggcagaggtgagccaactcttcctctcaagcaagcctgggttggctcggtgggtttggctctattcctgaactgtgcccatagcagtcaattattctccaggacaaggtgacccaggtatcaagcccaattatttctgaggtcctcttcctcaatgcaaccattctcctttaaaaagaaacggaggcacaggaaccctagctcccctgcccaaagataccgagcatgtctagggcaaagtcagtatttaccaaaactcagcatttcccctgaagagtcaggtggacacgtagattgctgggcttacctttgcagaaagcaggaggcagccccaggaatggaaaatgctaaaagatcctgagactgacaagaaaaccacagtatctggccagacctcagcaactgcttttctccacagaagattcagcaagtaaatcaaccagatgacacggatgcggagtagaaatccatgtgctgccctgtggcattgagggcagccccgaggcacagcggaaacacaggctgaaagatgcaagacacgctgggcgcggtggctcacacctgtaatcccagcactttgggaggctgagacgggtggataacaaggtcaggagttcaagaccttcctggccaagatggtgaaaccatcttgtatttttgtaaaaatacaaaaaatgagccaggtgtggtggtgggcacctgtaatcccagctactcaggaggctgaggcaggagaatcacttgaacccgggagggagaggttgcagtgagctgagatcgcaccactgcactccagcctgggcgacagagtgagactctgtctcaaaaaaaaaaaaaggtgcaagacaacgtccatgaacatcagtgagtaaatgccacaggacagaatagcaatctcaggccctggggcaggaagactgttgggatttggggagggtggggagttgggttttttaatttgtttgtgcttttcttcgcttttatgatgcacccccattgccagaaattcattacaaccctttggggtattaggaaattggataaataacaagactaatttgttaaggtctgtcgagagagaaaagaaagcagaatctgtcaaccgcacaatgataaggagacagggtcatgctctgcggtggatcctggcccgaggggctctcagtgggtctgagatttaaacagaaaaaaaaagtcaagggcagagcccattaaagagatcccgggcagtgaaggcaaggcactcccactggtcaaagacagggccattcgggcatcagtgggatggctgccaggaatggaaacattgaaagctcactgggcatcttggaaggatgctagggaactaactcactattccaaaaactggtaaataaaggggaaaaatcaagcatttatcttgctttttaaaaaaaaaaaaacataagaactgtgtatcagggaaattggatagttaatgaggggaagtttctctttatagaagtctttcaggcaataaataaagaagacacactagaacttgaatattgccattttaagtgaaaccatggggatgcaatcagcagaatgtagactatgaaaaattctacagcatctgatcagattccttcaaccggtaaattgcagggatagagagagtatctgtagattaagacttagaagatatatcaaccaagtaaccacttacaaaacatagactggatttggatcctgaattgaacacattttcttttaaaggtattagccattcaagaaaacctggaggcagatttgatatttgatactgaggaattgataattcgttgtgataattgtattgtttatgtcttttgaagagcccacatcttttagagatatacacagaaatattcgtggtgtttagcattttctccaaaataactcatgggcaggggagacagaggggggtcaactattgaggatggtgagggatacatgggggtttatggtactattctctctactgtgcatatgtttgatattttccatatatatacatatatatatgtatatatattcgagatggagtctcgctgtgtcacccaggctggagtgcaatggcgcgatctcagctcactgcaacctccgtttcccaggttcaagcatttctcctgccttagcctcttgagtagctgggattgcaggcacacgctgccatgcccggctatgtttttttttttttttttttttctttttctatttttagtagagacagggtttcaccatgttggtcaggctggtcttgaactcctgacctggtgatccacccacctcagcctcccaaagtgctgggattacaggcgtaagccactgtgccaggcctgttttccatattttttttaaaaaaagcaatcaacaatccaggaagcggggcctatgcaggaacatcacctcaaggccaagcttataaaatctatagttgatgaaatactgcaaagtgttcatcagcccatcatcaagaagtgctggagcgatgatgtcaacgatcatgccagtgaggggctctggcagctgattccaaagccagtgtaatatctgatgcctactcactgtcacccccagagtcctgagggccaagatggcaaactggttccaccaagccaagcaagcccaaaccatcgctacccaggatggaagcctcatttcgccagggccacccatgaggcaagcgaatgaaatattcacctggactcaccatcatcaacacttcaagaaaactgtggtttggatgatcaaaaccatttaccatcccagccagcctgcccccttccaaaagaaagagcatgtttcagcaccaactcctacaaagaagagtgactgctttaaaacagggacggtcagatgggctaatttcctgaatgtttcccaaatatttcttttcatttcttcctataagagatgctttccacaaataccaaggtattgattttccaattgatcgaggtggagaatgtttcatacagttatgactcctgacaagtggggaataaaaagccaatcataatgagttcatttacttggcttgatattactttataacacaatgcatacccaacacaccctttcaaggacatcacccagctaggctgccagctcttcatgatgaggccgcttaatgctgaaatccatcttactgcatgatgtgtggattttaaaatcatccttagtgggctttaaaaaaaaaatgccatagccatgctatggattcttcccctacacccatgaagactagattgatagagtgagaatgactcagatttggggatgggggttatagagggtgtttgttgatgaatgaagtggggggaatacagtgaaagcctaattgtcagttataaatatgctgtattttccctattgattatatgacatcgaaattaaaaggattaccttattagatcatatttaggcataagtatgcccttcgtgcttgactcggggcacttgcaagagactaattatttgagatgaacagcacagtctgttcagcgccccagacggtccaagcgctgcccctattcctatgcagatgctgttggactcttcagtctctttcatgaagttcatagagattctctgttctgaccagcctcctgtggctacacagagccctcctatacatcttctcagcaaattaggagatgaggcctaaataggacttctgtttgaggatttggatggctggcgcatcgttttccataagctttttggggcaaggtctggagttgagtggtcaccaacagagcctggcacttctttaaataagatgtcttacaacaaaatcccagcgctccagcgctcccaggaaatgaatcacggaggtctgcccgaggtgactccgtggagagcagagcatttatccccgtggacaccacaaagccttcttgttcatctttttgtgtgacttgtttaaaaaaatagattcctgctcttccctgccttctgaacagtgtcttttgagcacaatttagttcttccttgatgagtgaggtcagcccttccctcaccttccagagctcagcccaactaggctgcagggcagacggccccatggtctgcacatttctcatgagaatgagctataagggacaaagccccatcctgcctctctccattgactgtggctgagcagcatgagccttctggacctcagggtcctcgtctgagaagggtgcttcttagtggggccagagcaggaattcagtgaacaagtaaagtgatcataatgctgaaaatgcatgggtcattgtggggcgatgctaggcctccgggaatgccaatcttagccactcttgactatcataacgccaatttcttgcatcagagattcttggctagccacatttgctccccacatgcttagactgtggttactagggactcctcccatttgctattgaattcctctttgctctaaaactgaggtctgggcccacccacccaaatggagtgaaggtggtgtccgtccccacttaccccactgtacctgctgtcaccaccttctctctgcctgctcggggtgggtggggccctctccacatgcctccttttcctcaagggtgacctggtgagatgagatgttccaatagcccaatgttgaccccaagatggggacccattccagccccatcattccttctctgtgtgaccttggacaggtcatcccacctctctgagcctcagtattctcctctggaaaatggagctacaacccttaagcttcagggttgcatctaaagagttaggatcaaaatagataaactcttgcaaattcccagcacttggcaggggctccggaggggggcaattaatctccccattcgtccaggcaaggtgcaaccagcctttgattttggctgagttgtttaattttcacttctgctaacagcctccctttaatgtcacctctctcctcattcatttctggctttccaagctaccacggaaaccactctaggcaaaacagtaaaagtgaatgataagtcagagccaggttcattctcggtaatatagaacttggccaccaaagcaattacttaatgtaatgttccccaggaagggaaggggatgctgagcttattgagtgggtgcctaccatgtgccaggccctgagccagccacttcatctcctccaagcctccctggcgcacagatcccagaggtttgcacttctctgacccactaatcatgggccattattccatccctacctttagacaaggcaactcttggccattacatttccttaacactccaagccactgtgccaggtctacaggctgcagatagatagaggatccattttctggcaagcttggccagtgggcatgttctgttcccttgccacaccttggtagaggcaggaatgaccaccaggtgtacttggtggagagtctgccccagctgtggactgcagaaagaactcaggctgcagggctgtccaggaaggacctcaggctgaaagcaagtaggctggaactctagaccccaggcaggcccctgcaccttgctgagtctcagtttccccctctgtaaaagaccaggatggagcagggccatgtttccaactcccttgtagtccgtccccaccatgagcctcaccatccctcagattagcctggggcaggttggagccgcagaggagtagtgggtgccatcggttctgggcccacaggcctgagctctgttcccagagtcctgccccttcatagtcttgagccctaagaagctgtgcttctcacaagttcccctcctgcttcatttctatgcctgcccctagcagagctccttctagagctccctgcaacatgagccaacagctgtctgcttctccacctgcagacagaggtggaacagaggctctgttccatcatgttctcttgcatacaccatgaacaggccacgaggccaaaggaaagccagcctgggggccagcctggcccctgctgcctgccctgccctgggctccctcccacctcgtggcctctggtttgctgtgccctcttcctggggtgttcttcccttgatatcctcacggttccggccctcattctctcgtggtctcccctgacctcctagtgcttaacgccacccaaccctctcggccccctcaccagcctccacccttccccacagctcttgccaccacctcccattgcaagtatctctgcttgcttgcatatgtccatctgctcctttggaatctcatctgtggggtctcactgcctgcccagctcccagcacagtgcctgacacagaacagccatccatcaatgtttgttgaatgaatgaatgaatggaggaaacgtagaatcttagatgagtcttttgtgtccctcccacccagggcctctttaaaatagcaagagttgcactagatggcaattttccaatcactgtgtctgaatggttcactcaacaactcttcttagagttggttctttttagagaaggttctatgaaggcaggctctggagaaatccagactcagttcctgtcttccaccaaggagctcgcactggggtgtggagaggctctggtctggaatgaagctctcctctgagcagtttgaggagtaggcagaggacatgacacatgacagtaggtacagcatcttgtgggtccccgtcacacattcccaaacagcagaaacacaggaggcaccaggtcagaatctcatgcagggcagggacaccacccagaggatgaaacacagcgagtgcatgggggaaacctttctgggaagtgcggcgtctgcaggtctccttagcttggttttcattccctggctgagatcggagcatttcaaattagggtaaaaagggagttttaaaaaacactcactggaccttaaatgataggcctacactctgtaacagagaggaaaaaaggtctcaaaacctgcccctgagtctctaaaccccaacagcacacattttctgtgaaggccattgaccacctacagcctgagcctgacgatcgcagaggccacgagcttcaggatgtgtatttccagaatgcacccagcaacacttgagtcccgttaaccacttctagaaatttcagcaaacgtgtggtcagcatgttcattgccgagtctccatcacatgcttcctcctccgaggggaagagaaacctttgacaggctgcccaagcacccagcgatggtgtggggtccagtttcttgtttaaaacaatatgcagacctctgcattaaagaggaagccagaacaaagcagagaaaaccaggaagtggtagattttttttttaatgccattttctgataatactaaatacctatagcgaggcccctctgtttccagaccaggctccctcttctctgcttcccaagttttctgtatcactttctgccataacatcactctccccatactccaggtatctgttaatattcctgtgtccccctctggaccagggattggaaaactgcttctgtgaaggggaacatagtaaatattttagactgtgtgggtcatatggctgctgtcacactagtcaacttgcatggtggcatgaaggtggccatggacaatacgtagatggctttatccacaaaaacaggagtgttggacttggcccaggggccaggattggttgacttctgtcttggattgggttccttgaggggagaaagaccaattatttccttttatcacttccatgcttatcccagtgtttggcacataaaaggcattcactaaatgctcactgattgatgcacaaatgaataaagaacaaaactatatgtccaagaagagttgaagtttaaccaagagaagccgtcctacatttgttgttctttaacagttgagaaagattctactttggaaaaatgaaagcaactagcatgtattaagtactcagaatgtgtcaggtactgtgctaagtgccccacatttcttattttgatctcaaccataagctgaatcaagcacatgcatgttcctgaaatcacctgtaagcagcttattccctaagtaagcaaacacagaaatctctgtgactcttcatttgcaaacaaggcattcactgaaagtgcagtggcaactgccaacccagccagtatcagaatcatcatgttattctgaatttgaaggtccaactaacataaatggctccccatggcatcggagtaaaatgcctagctgcttcacaggagcaagcagggagagggtgggaaatcagcagcgagtccacccacctctgggacagtcagctgccacttttctgcctgcccccaacataaaatgtcagggaggcatttgttgaatcaggtcaacagtctcaattagtttttgttgttgttgttgttgtttttggcatgtttttataaagacagggtttcactatgttgcccaggttagtctcaaactcctggtctcaagcaatcctcccgcctcagcctctcaaagtgctggcattacaggtgtgagccactgtgcctggcctcaattaatttcttttttaaatgaatcaactgttggcctgaaagcccaggattcttggtaacactcagagcaaccccagatgcatcatgcaggacttctaggggaaagtgacatcttcaacttcatggcgccttcccccaggctgtccatactttgtctccccagctcacccagcacaatgctgcctgctttgtcctctaagttctgagttgcacccttttccctcgtcaggccccaggctaaaaatcaaaggcagaggacgcttaggcattgaagcatgggaaatggagtgtcacctggccagctggttttatcaaagcctgtaagtaaaatgggttcaagccactaggaaatattgggtaggaggcatggtcattgacttggtcatttaaaaaaatctagcttgacttggttcattctacactgttgggaatgacgtctatgcttctctcatcttctcaggcacaattgactccagaaatccaactaaaagaatgcctttcccttcatgatttagctcttatctcttttgatgtttccaaattgtaaccttaagcctgcgaggaggcggggtggaggggagaggagaaagagggagactcctctgttcacaaaagtattcatttccactggatttatttgacagcaaactccctaatcaatttttaatattgtgcttatttattatattaactaaacaatgcatgcacatacttaaaaaatatttcaaaaggcacaaaagggtaaacagtgaaaagcaactctccttcccacgtttgtctccctctctccctgaggcaagcaccactgaaggtttcttctctgctcttccaaagatatgctttgcttataaaagcatgtgcatatatatctttttcttaaacaaatggtagcacattctatacacagtattctgcactttgctttcttcacttggtgatagatcttgaagctcattccatatcagtatatatagagctgcctcattctttttaatggctgcatagcattatgctactgagacagaccactgtttgtttaaccggtcccctagtgatgggcattcattccctgctggagttttttagagaatgagattaacactagatgagcaggagcacggcacctgaacaaggtgaggcgtcactagcacaggcaagcagaggacaaaactccttgcagaaggaaatcttaaagaaaagaacatccaacaggagctgcacatcagtttcctccttcgagttgctgggggatatagatcacaaagcctttataatgttcgaaatgagcaggggctggtgcttctgggacgttacaatggcaatctggtcccacacactgtcagcctcctccatatagtgaaaacaacaggcccaccacagaaaaccctcaccccttcacctattcagtgagttgatccaatggggcccaggtgaacacaaaagagaacgtttctccccaggttttctcctcatcctacagcagggctccatttcattccacgtttctgagcacattatttcagggattagagagtgggagaaagagcacattgctcatttgtgtagcttgcaactcccgagagacccgaccatctcaccagcaccatttccattttctttacggcttccaactcctacctcgggtatgaacaaagcagggtaaaaaccaaaacaaacatcacgatgttgaccggaaaaaaaaacaaaacaaaataaaacaaaaaaactttacaatccctggggaataaaaggaatcaaactatggtattttgtgtactttttttgcaaggtggtaggattgctgcacagtttgatcgggaaaacagatgcaggcactaagaagaccacagactcctgctcaatttttcttaggagaaaatgaattgctttggcaatataccaccttttaaaataaggattctgcgaaataccctaacatattagtgactcagtgtaaaaattaagaaatgtttaaaagccaggtttcatggccagcatgttaatttagttaaagtacaaaatggtaaaaatgaaaacaagtccctaggcgtgtagaacatccacgaagcagaggctctgcccctgagaggctcttggagatgctcagtaaaggaatcccagcaaaagcaaagtgacagctcaacagagggcaaccacgggcacctgcaggggaaccaaaggcccctgtcctgtctgctcaccctgcgaagacacacgaggctcgaggctctatcttctcccagcaccttccaaagaacacctacaaatgggtgactcggcaaatggaaagtaaatctcattcctgtctcctgagctgagcacattctctgagtctattagcagaatctccaaatgctaccccagggacagcagtacctgtcaggtgtgcctctctgttgaacaggaatatttatgcaggctggtggtcttcagaaagtcttcattaaagtaatgaagttgaaggatgcgtgctagcagaaaaacagcaggcaatagaatcttagcgaacggcggcaccatgtcaaacggctccaggcctgcatcacggaatgtggaatgggctacaggggagagagccatggttgagaagcagatctctacctgggtcctaccaacaaagacacctgccttgacaggtcccacagccctttcttttgatatctaaatgggatttggttgtgagcggctgaggtggggcccacccatggtcctttaagctcacgtgacctgagaaagtgcagcattttcagagaaccatctagaacaccatctagtgcttttggcttggactcaacagccaagttgaggggtgcaagctgaggatgggctttggtgagagtctgatggagccgctagaagggagttagagcactgtggggcttcagtttgtgggctccaggcccacatcacagcagagcaacagagcagaccccaacagagcagaagtgtccaggcagcaagatgctgatgggttcttgccatgtcctccctacccttgatgttggagctccaaccttgaagccttggagctggaaaatggaaaatgcgtcttcaaagaccttgagcagctgggagccttgcagaggcatcccacatggacagaactaactagaagagtccctctctatcacattctgtgcttatgatggccccatggggaacctgagaaggccacggggccaccataagcagctcctttggcagatgcaggttctagcaaataactgctctatttcctctacaagtttccacacaggaagccggggggctggcttcagtctgcaactacatctgcttctgatcccagaagcccgtcaattctggcagaactaagggtcttttagcaaattgaactgcaggagctatgacccatgagtctgagaagccaaattcttatcctttttcagacagccccagagtttggttgacaaatccatcaaagctttggaactgctaagtgtagacagccctaagggccaccactgaacgagacaccatgaccgtccaaaagcgcttcaggacgctcctccaattattgttttgtatctgcaattcaggcagagcccctgataaaacgcactgcgggttattggagaaatgaaaagagctggagccagcagggcgggagccggctgcaacctggaagggccaagcatgagtttggaagtacaaacacccccgtgcagaatcatattttccatcggaaatctttgctggagaaagcccaagctcattctcataggagggtctgcgccagtttttatgagactccaaaatgaagttggagtttgggcctttggcttagttgcctgcagaaaaagcaagctcagagctggaggaagtgaaccacctgggaagccaggaagccccggggctgggaattttgtctgtttattgagcgatttgggtggtattggaaatcaatctctccctctctctgggcctctctcacacacacccactctctctatctgtgtgtgggaacttcagggttatccggagggaagggttggagtgtgtggtgtggatgaggccatgtgaccttattgataaatgcaagtggtctcccagcggtttctcctgggacctctaccatcaccctgtgatgctaggagctgcccaccctgtgtgagagcaggaaccagaaggcagacgggacagaggagggctggggccagccctgcaagtccagctccccagccagcgtggggctatgctttctaagccgtgtcccctgagaatgctggcaatgccaacacggaggtgttcaggaaggacgtgaagtcactgggctttggcctgggtctcgccttctgtctggtccccagggtcacccagatgtgcagcctctggacgtggctcacctcttcccttttacagagctgatccccccacttctcctcatctgtggctgcagccatcaggaaatgtcggccaaccatgcctaatgcaggtcctgtgacttttgcttgagctggggtcagatacttagctgagtgactgcgtgcaggagccccaggagcagcacggcctcccccaacccatggagacagcaccgggcacagggcaggcaccgaggcttccccacagccgtttgcccataggcactgcacagggccagagtcggtagtgcaggaggcaggggctccaggctcagcagagcagcacagcaggagcttggagctgtgcattcacctgtgcaaggccacccagggcaggaagagaaagaggtggatgctcctgtagggcacacccagctactggagctgtcaaccacagcagggctctgtggctgtgaatccaggagaacttggaggaaggagcccagagcaagatgctggtgggcctcgcctgggttttgggggaggaaagcggggaggaggccgtcagggtcggctctgtttggctgggcccccagtgtgaagagagcacgctttctcccaccatcttcaccctctccctaactcctctccagttgagtggtgcacccaggggtgcattcttagaaccccaggaggaaaagataagaaccaacaagagagtcaaagctaaggggacagagaggcctcctccaaagccctctcatggtctccaccaccctgagcaagggctgtcttcagataggagacgtggctgacatcccacctatgaccagagaattccagacccaacaacaaaggccagcatggaagagctctgcccccagtgtgggcatttccctggattgtggtggccctgccctgagcttctggtcgtgtcctgggtcacgtaggaccactcactgtgtgtctcctgagagccacctgaagaaaaagagcaagcaagagagagaaagacaaagaaggaaagagagagagagaggaggggaggggagggaaagagagagagagaaagaaagaaggaaagaaagaaggaaagaaagagaggagggaaggggggaagggaaggaaaagagaaagagagagacagaggggaaggaaaaaaaattctaagtactccgtggcattcggtctttcaggaagtcattattaggtgccacctgtatgcccagctcatgctaggcattgcagaggccactaaagagctggaggcattagctctgtcctccaaggaatcaaaatgtagttggacataaatgatccaaagaaattgctggaacccaaagaagagggcacatgatgttggatgtgtatcctctctcattcccagcagggatgaggatggggagatggcaacgtggaccaccctcacttcctcgggccgccacatgaaaaagtctagcacagggactcgcagccacgggcagttttgcaccacccacctccaccccccgccccccccccccccccccccggggacatttggcaagtctagaaatatttcttttggattgttgattactagggatgtggggaaatgctactggcatctaatgggtagagagtccagggatgctgatgaacattccaaaatgcacaggacaggcccacaacacagaattatccagccccagatgccagtggtgctgagattgggaaaaccagctctggcactgcagctaagagcacgggtttggccgggcatgatgactcacgcctgtaataccagccctttgggagtccaaggcaggtggattacctgaggtcaggagttcgagaccagcctggagcctggccaacatggtgaaaccctgtctctactaaaaaatacaaaaagttaggcaggcatggtggcaggcacctgtaagcccagctactcgggaggctgaggtagtagaatcgcttgaacccaggaggtggaggttgcagtgagctgagattgcaccactgcactccagcctgggcaacaagagactcggtctcaaaaaaaaaaaaaaaaaagcacgggtttaaagtcccccagacgtgattgcatgtgggcctggtacttcactgctggcctcttctgtctcctcatcagtagattgaggatgatgattgtgagaatggaatgagatggttcacagagaaggcttgagggcagtgcctggctcacgcatttcaagtgtttgttctcaccgttattaaaaacctgcaaactgccaaactaggacagaaactcgtgagctttttgctcctcaacccaggtttttcttgctcatggaacactccccaagaaagtgcaaggcgcagcttggcttgtcttgggatctgccttggtgctgctcccagatgtatgcaaccagctctcgggatccctatggccagccggccccacctttggggggtgagatgtgtggacagggccccaagctgactcatcccctctagaagacaagtgtccattccctctcactcctattgttgtcttagggatgaagggttttcatgtacaagcctagggtttgggacggtgtggggtttggaggccttcctggggatgccaaggggcttgaaccagagacggtctttctctgttccagcaggaaaaaagctgatgagtccagctccaagctctgcccctggggctccctgcagtgcagaaggggcaggtcccaccaactcccattaggggacagcatcacctggcaggggaggagggctgctcagggctggcctggccaagagctctctgacgcatgttccttgtggcatgaccaggatgctgagctgggactcggggacttgggcctgccagctggaagccagcagggaaggctgttgttggttaactctctggtaacaatttgtacaaacgccaccaggcccgtggaagcctcgctttcgtcggagctgtggttccccaaaagcctgttgcagatccagagtcctctgcacgtcttttcctttccttccttccagaagcctgaacttgacctcagtggcagggctgcggcgacctcggctgcccttgctgcctcttacccagccttctgtctggcccattctttgtttaggttttttggagaatcatccgggggtgtttgcattctacttcccttccccagacccagcagcccccacccgcggcaacagcagcctccacacatcagcggcactcagcggcctctgtgggccagaccgcggggtgtttaaacgctccagccgcttcaaggtctcccacgtccatccgctcagtaatacgtgatgtatcatgcatacaactatgaacaaaaccaacccctgtgcatgcatccatgctgcgtgcagcctggtagctgtataataccagctgtaatagagacatttgagaattgtgcacacacacaaatataaaattacagctgtgatcagaactgtgacaagaggtacacagtggtgacagagcctgaaattgagggactagtcagagaggccaggggaggctccccagagaaggtgaggactgggccttgggaaggaataatgagggccacctgagtcaaggagggagcaaaaatgagcctgacatgagcttgactcccagagagagggattgaggaggaagccaggggagctggagcccagaaagcaaagattgtgatatgattgaagacaggagaaggaggccatagggaaggttttaggcagaggagggacaaggttagattgactggaaaggatgtttctagctgcgatgtagagaatagactacaggggacgagcatatttggacagatcagttggagggcattggagaggtgcagggaaaattagggattcatgcactgggagggtgaggtggagtagcgaggaaaatgggtgattccagagaaatctaggacaatcaaaaacacccttactgtggattaggtaagacttgagggtgaggaaggaaacttgcttacagattttggatggatgagacaccattcgccaaggcagaaaactgggagaccagacttggagggagaagtcctgggcctggtttggagctggtgaggtctgaggacctctaggccatccagggccattctccatgtgagcccacgctcctttccaaccgagagctgctcactccacactacaatccatggacttaaccagggatagttctccagccaggagtgaacttcctgccccctctccctagacccaacccttcattcaaggcaagctcttcctccaggaagtcctaccggataaaccagctttggtccagcacccctcactgaagcagtgatgagagacccaggtacccagttaccatcttgcaagaccgaagcctgcaagaagcgcttccccgcacaaaaaagaggttccagctctgcttctctttgccttttaccctagttattcacatgcacatcctggcgccctgcctggaggacagaaaccctgccttgtagtctttgtagcctccacaaccccacgcccagggtcttgcattgagccatcacccagcaccggcattgaaccacagcttcccctccaagccccggtggtgcacagccacatttacatcccagtatatgcgttccaaataggccgcaggaggtgcttgctgaaacaccattccatcttgtgctcagagccgaggtcgagcaaatggatctgcgcagaaaatgctctttaaaatgcattatgctcatgagtttaaagagacgcctgctgctcagtgaatttaaaacaggagcaagccggtgatgaatgacctcaggttgttacaaggctaagaaacaaggagctctgtctgcctgcctgtaaataaagtgtggacatatatcacctacagggctttgccggagggagactcttaaacctattggacaggaaaacacagttcccagctcatcagaatatcatacaataaggttcttattcggataaaatatgaaaacagtcacagctgtggggaggggggcccccccccatacccattatggaggacagggtctccgggatggcatgactcagggtcacagtcctacttggacttgcttgggtgtgaaggtggctcctacgctgagagcaaacacctgggaagtgacctgaaggcaggaacaaacaggtgtgattgttgttgggttttttttaaaaaacgaatctagcagattttattttttaacttttctatgctgggtggcactacgaagacaggtcctaacctggcttaatgggggaggaaattagttgaggtcatctataatatactaattatatccttctgtgcccactcctcttagagccagctgtgaaattaacagtagaacaagctgttagcaagccatgattaaatatgccccatgtccagtgcaccgtggtaggcactgtgggggggttggagggagggattaaagacctgcagaagcccttctgctgctccagggctctgcatacagatgcaaggcagctctggagcaattctggagctaagtgcaaagcaatgactccactctgagcagctgaactgggaaggtgaaggcatcccactgtgatgggctaagagaagagaggtttcccaggtgagccatgttttcagtttacactcactttggggagcagagttggctgtctgcagacttcctttctctgtattacaaaccatcccagggtccctctgggcctgggtgttggtgtcatcatggggctgtgcacagaaacagatacaagatgaagcatgggctccacgccaccaaggtgagcaggtgtataatcaccctggcgtgagtggtttggacaattattcatacagactgtttcttccaagatggacagcttctcatcaaggctcagggaagctgggtttgtgaccttgggcaagttatttgcttctggaaaccccagccccccctatctgcagatgagtagtgcctgccaaccagtccccagggtgcatttgtgagcccgaaccacttccaccacttccgcatgacgtttattgggcaaagcaatgaatgatgcacgggtgccagatgccctgcactgggaggcaggcttcttgcttagctcctcggggcaagcctcattcattgagcaagcatttactgagcacttgctgagtactaggagtgtgctggccacagcacagcactgcaggtacgctgccgaccggcaccactttggctcgctgagcttggaatttccatggtggtttaactcaaccctgcacacgtttcacagcaggctccccaccctccacttgctaaggagacaacgcagcagatggtgaaggcggaaactctggtgtcacactgcatgggttcaaatcccagtttgccactgaatgctgtaatgtgagcaggcgacactccctcgatggaatgaagggcatgatcatgtcaagcactgatgcggaggatactctcaataaactgacctcctgttgctgttactattacgctatttttaaaagaaagtgtgtgcttgccgtggcacgtggctgtgcagagccaggtgagggtgtactcagttggccttcctccctgcctgaggcccacggcacagagcgcagctcgcggtcttcacttttgctttgtgactttgggaggtgcacccccatctccccctgttcctcgaggaaaacacagatttttaaatcttccgccttctctagagtcccctgtgagactgactggcgtataaaaaagccctccacaggaagaagagaccgcagagtagaatattttaaattgaggctacttgcctccagaaaaccctgcctctgggtctctgcctctgaggctgcaagtctctgggccattgagcaggaagcgcttctccaacatctcagctgtgttccaggattcccagcagagaggctcaccgccataggggcgggaccctgagccacgtgtggctatttaaaacatccaaaacatgattacttcaacgtggagacaaaaaatattgcaatatttagtctttttttctataccatgttttcaaaatctggtgtgtgtttttgctcttacagcatatctcaattcagatgctgcattttcatcagaaacacttgatctgtacttagatttcgtaaaatgtaaagtggaagacagattcatacatttgggctgttccaaacaagcattaaagttttccaataactgaatcaggtgttactttttttttttcattttaattaagtaaaaggacacctctgctcctcggccgtgctggctcccaccactgcggtccaagctcaagccctgatataagccacacctggtaaaacctcccaggggcttctgaattcatcacaagacaacctcccagagaggccgtcccaggcctcgcatgggtcgaatgcccaggaacctatgcctctgtcagtgagcagctgtaattttttttttgcaattccttcacacattaagccaaaacctgcctctttgtaacttacaccctcctaccttccttttgttccccagagccaagtgaaggcaagttggctgcctcagctgtgcgacagctcttcaaaattctaaggcaactctcacacttccctagccttcccctctcccactccaaaccatcacactcgatctgtttagtacccacaggaagagaaacctaggaagcaagtatcagtccttcacactttagtagaaattggcccatcaacttgctttcctctgcagggctgggaaggtgaacagatgctcccagctatctggggcccacagaggcagcaggaggaccagtgtgtaataggacagcagcagaatcaaagggtttatcatctctgccagccagagcctggatggcagtggagtttccaggacactgcggttggtcctgatgcatgcgatcatctccagcagcctgtgcgcagaaggccaaccaggaagtcacagatgccaccatgaacacctcaggtctggcacccatcctggtggcagcagcatcacttgagccttgtgtgccctagcccacccgttgcctgggtaggggagatggccaggcacggggaaggggaatggagatggggcaagggcacactatggatccccctggctgtctcagaccaaagccctcctcagatggccatttcccccaacacaccccggggccagcttcggggctgtctgtgtggtctctgccccttctctgctatgggactcattgcatcatccagttaactcctgtctccccatcaggctgcaagccccatcttctcccccatcatcaggctgcaagccccgtcttctcccgcatcatcaggctgcaagccccgtcttctcccccatcatcaggctgcaagccccgtcttctcccccatcatcaggctgcaagccccgtcttctcccccatcatcaggctgcaagccccgtcttctcccgcatcatcaggctgcaagccccgtcttctcccccatcatcaggctgcaagccccgtcttctcccccatcatcaggctgcaagccccgtctgtcctggttattgctgcatcctcagtgcctggcacccaactgttagttcccttaccttcggaaaggtgtcaggtgccagcctggaggagaaaaagtccaaaccaggccgcgtgtttcctgtgcattctatgtccccagccacctgggccttagtgacagactgtgtagtagatcgatgaatgaatgacaacgggtggccaagcatggaggtatacgctgccttctctccttctggcagaacgtgatgatgggcacagaattgaggtttgtatgggttgaattttatccccaaagctaaccccctcctgagctgtctacacctctgtcctagcttttgagacatgggaaggggtatacaccagtcgcccacacccatccactcaggcggtcaagaactatcaggagaagagggcttggctaacccctctgtgggatatccaatgcggccctggcctcctagtgagccgcagaccactaggggggccgagcccagcactgtccatggcggtaatgaccaaggggactttgcagggtggcaatgtcactgcgaggcacgaggtcctggaagaaggggagctggtagaggaacaagcacgccaggtggtgaagatggctatgaagacacagagactaccaacagccacgacgctcagagaccgatggcacgtctaccaggagcctaggctgaggccacagaacgggagcccatcgctggggagacagcttccacccatgtgactggcagccctccccaccccgcaccctgaccatgcgccctgagacccagccaggaaaagctggctctgaaaacagcctgcacagactggtgaccactgacacacacccaggagcactgcagcctcctgctccgggacaaggctgaccctgcaggtcagcctgggcttccctgggatggcctgagccacttccaggagctccttgtccctccttctgaagagcaacaagacctaatggcaggtggcaccccatctcggcagcactgagcagaagtgcactctccctccccttctcctcactgtgactcggcatcaccgctgtgcccggggaactcagcctgcaggcctcggctggactcgctgcagctgcggccccttccctcaatgcctccccacagtgcccagacctgctccagccgctcgggtgtctgtccctcccatcatgtagcccaacgctggccccaccacaggaaccttcttggcacccgcccagcccaggagaagggtcaccaggccctcccacgtggtgggaagaaaggctccacgatggtttccaagcccaaaatgaaggcagtgacctttaggacaaagtccttgcccatgccctcagcctcctagcgttctccgaccaagagctggtgacatcatcctcagagtcactctcaccaacctgggaaaagtcagaagtgaaaaatagccagaaagagtccccatgcctttccccggcctgaaaaacggggggcagatcattttggaatctggagatgaaccccgaaggatcaacagttcactgcttaatggcagtgagcatctgcccggagccagcccagcctcagcctcgtaggggagcagactgtgtagcccagagagggggaacggctcgctgaggtcacagagcacactctcggcctccctggtcctgtgggcccagaggagagtctacacttccagggcgcaaatctcagcacttgacaaatcaaaccagattgtcattgtccctctagcccaggctgggcctctggatgccgtaaggtcacccgagcctgttgctggcatcctgccccccagcccgcggctgtcctgcagcagcctccttccccaggggcccctcctgggcccaggtagccatcaaagtgttcaggcagaacctcccaggctgggtcagctgctgacggttacaggattctaaactcgggacagcgggtgactgtgtggtgaagcattaaccttgcccagagagagctggcctctgctcccggcaggtgaccgctaagcccttgggatgtcctgcctgataagagtgtctttgtttaactgagggtcttgggccatcccggatcgcttatgctgacaatatgctttatggcgggggccttgggctcaaatcccagagggctggagacggaggtcagccatgtgggtgggcagccacgtctatgtggcagagccccagtggatacttccagttctagcagcacttgtgtgcagtcacacatcatgtgggtaagtggtgtccatgccacttccctgagagaggagagctggaactcacaactggagtcctcctggcccctgccccacacgcccttccccgggccgacctcacgctgcgaccttcgctggaggaaccgcagtgagcacagcagtgctactgagttctgagaggactccagcaaaatgccgaaccggagggtggacttgggaactctggaaagatctatcctctatctggatctctatttccacctcaaactaaggaagaccaacaaaaatctccctggtcctttgatgggtctctgcatttaaatggcctatgtgcatacgtgtgtacgtttcggctgaaggtctgaatctcagatggcagagcctcaggcaccagtgtgtggagtgttctgggcaccttggcagcacagggacagtcccttcccttgaccctggctctcaggaccgtgcgcccaatgcgtgggcatggccagctgtggcagagtccctggagctcaatcctcaccatgtactggaaccctatccgcacactggccaggttttcttcctgttacatgtatcgagtagctactacaggcctgggctcaggtgcccaggacacaaacagaaatagacaaaactaccacctgcaggagcaacattcccctgctggcagggggtggagggagtctcgttgcccatcaaccctgcaaaggccctgacaaggcctgccggaagaactcttttttaactttgaagaacttgacatttctctctctcccttttttttccacctacaaacacctcctagcactctgtggagcatgtagtccccacacgcctcgggaataaaaggctgtcccgccaccccacctacctgtgccatctccacctctccgtccacctcttgctcctcatggcccatgatgttggaagagaaagtctgtgttcccaggaggacacagcttatggctcagcctggagatgatgaggcccacaagagccgttccggggtctggaggccgcaggtgcacagcattccctgcatccacgtggctgagcctgacgggacagaggcacacacctgtgagcctcccgggagaggctgcctgtctgtgtgggggctatgcagcctggtgctctccctcccaccatggctcgttctctctcctctctcctctcctctcctcctatctcttcctctctccctccctcctgtgggtatgctgagaattctgtagataaattagcattatcaacactattatcgtcaacgtgcctgttataatttcctcctaatgacagcagaacagcacggcgtgcagttagcagagcatgtgtcctggagccccctggcatgtttgactcccagctctgccacttacaaggtgtgagagcctggccagacacctgccccttccacacctcgttttccccatcaggagcactgttgtgagattaaatgggtagatttgtgagggctgtgtggcaggccacagaggatgctggctatgtgttttccgtatcatggtggtcactttctgagccccttcttggcctttctgtgactcctctggcactttcatgacactgggggctgcggcactgccctggtctttcccacgtgggtcctgcctctttgcccaggtgtcagcctccctggggaaagccaggtcttgctctgctcacttgggactgggcaaccctgagcttctcaagaaataggagctgagtgggtctgaatgcacccaacacccacccacagtaacctgtccagggcccaccctcattcccgaggctccctgcttacctaacgattccaagatgtcctagaaccttctcccaaacagcacctgcagaaaagatggcggcttgggctccggccttacaagtgttttctgggccgcagggcgaggctgtgggcagggcctttctcgtcccagccccagcactgtgcctggcactcagcagacagtggcggaattatttgagcaaattcgggttttcccaagcaagagaagccgtgctgtggtctcaggtctgttaggtccacactgagagaggcagaggcccacagctctctgcaggaggtgggaagggcctccgtccacctggctggccatcggcaggtcagagagccccgtgtcctcactcctgcctgcccacttgccttcctcctcggcctcctcgaaccctcaggccacgccccactgagggcagaggcagcccccgccctctgcaaggatggccagccaagaacaagccctgtagcagggcgagtgtgactgggtcctgggaagggagcccctgaggctggggaggccagagagcagcctctcagctgagtcctgaggacagcagaggacaagagcttcagagggaggctcttcatggggtctaaggaggcaaacccctcactgccagggaaggagctcagtgcagaatgtccgggacggataaatcgagagacagccaccgaagcacgttcttagaaacatgctggcagatgacacaggcggcagctgggaaggcagcaaggaggagccgctggagagggtggggctgaggattggatttgtcatcctcaacctacagagctctttggcttttaaattatgtacatgtcttactttgataaaaagaataacaatgcaatactagattttcttaactcctctgatcagagtaagaggaccagtgcctcaatggtgcggagatggatcgtgtcaggttcacctgtaggtcaacgatggtgcagccatcaattgaataggacacagcagttaagaagaatgaggaggagctcgtgctctgctctggagagatgtctacaatacatcattacacggagaagacaatgaagccagcgtgctcagaaagacatcccgcgctggggagacacgggagaacccagccccatcccaaacagtctatggccatcaggtggcagccggcagctcctccatggaatactttcccttcctttattgtccatttcggccaggatttccatttttagaataagcatggatttcaattgcaatcagaaaagcacttatgccataaaaatatacaaacataagtttagaggaaataagtataacttcatgttccttactagaccaccaaatggttcaagaaacattggagggaggggcccaggaggagtgagcggggagttccatcaccttgttgaaaggggggtcagcccaagagtgcaagcagggtcatgagaaggggacacttaggaattcatccttcttactcttctggttgtgttgcagatgaaatacaagacactcagttacactggacatttcagataagccatgaatttcctttttttttttttttttttgagacagagtctcactctgtggcccaggctggagtgcagtggttcaatcttggctcattgcgacctccaccctctgagtccctctgagttcaagcaattctcctgcctcagcctcctgagtagctaggactacaggcgcgccaccacgcccggctaatttttgtatttttagtagagacagggttttgccatgtttgccaggctggtcttgaactcctgacctcaagtgatccaccctccttggcctcccaaagtgctgggcatgagccactgcacccggcttatttattttttttagtataagtgtgtcccaaatatctaataggatatacttgtactaaaaagtcatccagttatctgaagttccagtgaaccggggggtgggggcggtggggaggtcggggtcctgaatttgtatttgctcagtctagcagccctgtgctttgcggactggggcccctttgagagcttgatgaaaactgtggactttcttctggaaaagtcccactttgtaaacaatcccagagaattcaaggagccctctgaaagtccatcagtgaatttagaccaggacttggaaaacttgttccgtaaagcacctgatagtacacatttgtcgttgttgttgttgttgagacagagtcttgctctgttgcccaggctggagtgcaatggcgtgatctcggctcactgcagtctccacctcctaggttcaaataattctcctgcctcagcctcccaagtagctgggattacaagtgcctaccaccacgccaggctaattttttgtattttagtagagatggggtttcaccatgctggccagactggtctggaactcctgacctcaggtggtccacccatctcagcctcccaaagtgttgggattacaggcatgagccactgaacccaactgatagtacatattttcagcagaagcagctgtagatgaaaactacacaagcagacgtggctgggtcccaagaaaatattatgagaagctcaaatctgggttcccagagtcatttctgcgtactaagaaagatattcttgtccgggcgtggtggctgacaccaatgctttgggaggccaaggagggaggatggcttgaggccaggagttagggaccagtctgggtaacatagcaagatcccacctctacagaaaattacaaaattagccagtcactgtggcacacaccaatagtcccagctactcagggggctgaggcaggaggatcacttgagttcaaaagtttgaggttaaggtgagctatgattgtacccctgcactccagcctgagaaacacaatgagacctcgtctcaaaacatacgtgtgtgtgtatgaaaaagtatatatatgtatattctatatacacacatatatatgtgtataaatatatataagaaaaagaaatatatatctatgagaaaaggaatatgtatgtttttttctttcttagcagacaggccagatttgtccaaaagcccgagtttgcccaccccgatctagaacatctttctacaaaatcctcgcatcatgaatccccctgcaccagccaccctctctgctgctacagcccagagacctcctttcaagtgagtttgcataagcggctgaggaatccctgaggtcagtggcgggggcggggtgctgttttttaagaagacatttttcctggaaggaacagggctggtactggcacggtccttttctgatgatttagtcagaacagccctccagctcactggtctgtgcaccaaagctgtggtagagggcagtgaaagtggtcattgcggacgagggctcggagccaaaggccctctggggaagaggatgccaggacggcttgcaggaggtgcttggtgcttcctggaaaaagagggggaatgaacgatcagggggtccatgcagcatgggaggggtttctgaggccaggccctgttgtgggcaccaactgggtcattgggtcaggatttccagatgggtagtgactttcttggggtgcttaggaagagaagtgggtccggttttgcttcccatcactcccctctccgtccactgtctgctcattcgccgctcgtgtgctgtggtggaactcactgcctatttgctgtcaggttccatggcggaagccatgctggatttgtggcgcggtcacaccatcgcccagagaatatgcgtgacttcctgacacagggaggaacacgcacgtggttgccaaagcgctatcaagcacagcaagacctccccaggccagggcccccacgccggctcaggacgggactggccctggtcactcattccacagggaagccagccaagtggtaagcagagagcaagcctattacaaagctacactcacacagcggaaaggctgtccccgggcaggaccttgagcacccacgcgcctgggatgccaccggcacagggaggcatccagaaaacattggtggaataaatacattcattaatcgctcctgacattcgctccttcttgcttatgttgctcttagggaattcaaatgctcttctttttatgatatgtggttgcttttttatgccctttcttgataaaataaaaagtggcagctgggcacagtggctcacacctgtaattccagcactttgggaggccaaggctggtggatcacctgacgtcgggacttcaagaccagcctggtgaacatggcgaaaccccatctctactaaaaatacaaaaattagccaggcgtggtggcgcatgcctgtagtcccaccgactcaggaggctgaggcaggataatcgcttgaacccggaaggcagagattgcagtgagctgagatcatgccactggactccagtcggggcaacagagtaagactctgtttaaaataaaaaataaaaaaaaagtggcaatctcctgatttggttttgttttgtttttactggtctgcaaaatcccaaatctgaggcccatttccataaatgaacagattagaacaataggtcagtgtgttcactgaatggaaaggatatccctgaagtaccccaaaatcgttcatgtttatcctctttcctatttactacagagacttttgtggttttttgtttgtttgtttattttaatacagaacgtttccattctcctccataagctttgtaaaacaagacattacaaagtgtatactactgagctctgggaagatactgcggaaactcttactggatcaagccagcgacataaaaaggctcttttgtaaaatcactagataatggaagttccttgtatgattttgttcacctgtaagaggctttccacgtggggttggcctctcatggaactggccaaaggtctggggagcagaggaatcagaagcagaaaagccaggtagacaattgatcatccatcgcacctgcatcaaacagctaagggagtaagagaaagtgcgctgagtctacgatcccatagacagccccgcagtccatgagcgaggaacagatatgctgagatttcattaagagggccttgaaaaatcaacttgcaaggattagatgcttgttatttccaagtggtttttgaattttcggggtttttttttttaacgaaataaataattctatagattcttttccccaatcagttgcctgtctttgaaattaaccatttccctggctttctccctgattgggaccgcgcccctcctcagtctttctgaagtgctattgtgttggatgttattcgcttagccacacataatgtaactttgaaatgcgatggaaaaaaaaatgagcatttccagtgaactgaaaagaatgcatctgattttaaaatgtgtacttaaaaaaggtgcacccaaattgattgtaccaactacagggctcattctgccaagccaaatctgaaatgcattttttgcaaaaggacagctttattatgattttttagaggaaagaaatatgtagatccaggcacagagggaaaaaaaagcatcttgaggatttaatacagcttggattaatcaaagcgtctgcttttaagctgtgtgcccccacagaggagtgaattaatgagcaatttatgcaatgaatatatttttttctttcattatctaggtatttcagaggaatgtgcttcttccgacttcaattctccagatatttctctgaaacgttagcttcattttgcatgtataattacagcctcaagtcgtttggagagcaagtctcaaggtagtcgaaaacttctcaccccccaccctcatgcaaatcaagtcggttgctcaccattcaacctcaaatctcccctgaaaccttttgaatgaataatccattttggaattatccttaagccagcgtttccaaggctggtttggaggatggggtgctttagtaagaatacagatgccggaaccccattcctggaagctcaaaaccagcaagtctgggacagggcttggcaccctgtgttgttcaagtttatgtagcagaatggccaggtttacactccccgctctccacccgccaaggagaagaaaatgctaaattaggcccgttaacttagctgctgcctcacagggggtaatttgtagacccaaggctgaacctgaaggctggagctaagagtgaacaagaagatgggttttcctctctggtaacacaagttcagttgcaatttagatccccaagaaatgtacctggggtctttggaaatgacctgaatttgcaatctgtgttactccaccagcccctagaaatgctgggaggtcaccagggtacagttcttctatcccataattgtcctggcttccaggaaatgggaagggggctgggagggggcgggcctatagccttatcttcccctgcagcctcatcaaaatggacgggaaacaataggtgaacccgccaagtaggctggaggtattgaaatctctgggcatggatggtggttcggttggtggaatgtccctttctctcggaagacaatcgagtggccttacctgagagcaaggaacatggcggcagggctcggaagaggaacccagacgtcacctccgaggccatggccccggctgcctcctgccggtcctcctcgggcgatctccccgaccaagcgcttttcagattctgaaaggagggggtttcaacctgatcctaaagtgcctggacagtggaaggaattgatcccccacaggcccttctcccctccgaccgcagcccttcctggtctgctgagttcaggaggcaccagtgtcgacccccaggtgaacttctttccatttgctccacttaggattaaagggagtggggctggggctggggatgggccaggctggggtgaatttccatggctggccctctactctcccccactggggaactttctgggaccagaaacttcaagtgcagagaagcacaagtggccgctccttccagtcaccgccctccttgccacatttccattagcaccaaaatcacaacatccagagcctggatggcttcgcggcttggataattattttctcattagttccattcacattcacctgcgatcttcattagacactgatgtatatataaaacggtcatctttgggtatacgcagccaactgggcccactgcgtcactggcgcctgcccccagcccttcactccacacccactccctccagtgtgggcagtgggcaagggttccaggctcccacgcatgtgcaggaggaagcgtcctggggggctggggcagatggcctcacactgttcctaggcttctgcctctgctgcctggacgcccaccattagcagggcagtgtgaaggcttgacaatcgccccttcttgtgcctgggaccatgcgtggttggatcacgagggaccctgcaggacagctggagtaccttagagtctgcaggcttcctgtcttcccagaatcacctagaatatgttctgtctctggggctgacagcccaggaagttgacattccaagcccccaaatggccagttgtatccactcgtcccacagcgcttcttgaagggccactctgggggcagtcgctgtgttagctgtcagacttcagcagggcatcaaggagagccccatcctcgcagaatggaatacggaagaacacacgcacaatcgccagtatgtggctgtctttgacctgcaagagcagcgatttcatttagttagacttaatccactgcaggcaaacaaagagatgataagcaaaggccaggaatgtgttatagaactaagtgctgcagtggaaggagagcagggccaggggcttctgcgcagagaagggggagagggcaggagtgtgcggtggatcccaaccacctgcaggaacaggtgctggcccagctgaggaggcaaaaccacgacaccagaagacgagcagattgccttttccagaatacctccctgggagtctccgtctgcacccaggagagcttggagaagtcccctgagggagcccagcccctccctggatggatgcttttgtttgctttgtagtggctggtgcaggcttgggccagaactgagtcgctggacaacagaggcagggctctatctccatgagcctcctctccagcttcctcccaccacactaccctctcctctgatgagacataaaatgacccccagtttggacatgcccaggcccctctccaatgtggccgtgcattctgaacaagccgtcatgggcagtgtcttctggaatcagctgtggacagccctcgcccctcctcaggcaccctggggctggttctggcccctctagagtccctcatgcctctcggggtggcaacctgcctctggagtcagacctggggttgagtccccatctgcaaggtcccatgtctgtgtagctgtgggtgggtcgcccaagctctcagagcctctctctgcccacctgtgaagggggatcatgccagcactttccttgtatgatccaatgagatgaggtgtgcacagtcagcattcaaaccacgtcaaatagtttgggttcttttttgtcttccgtagggtagctgcaggtggttccctgaagcaaagtccactcatgtctgttctacctctagcagtctccagcactattttcaggattgtcttaaaccctcaaaaagatggcccactcctgaccttccagaaacatttctacagaccagccagaaactcaggttccccaggagcttgcctttccccagctccaggttcacagcctccatgaaagtagaaagactaacaagctttctagaagaggaaaattaacaaatgagatgtctttcaaagagtgcatgcaaggagggccatgctgtagccagctccaaataaataggcactttgggtatttccaaggcaaatgggagagccgggggcttgtgagatgctgcttctccgtgacagtgactctgcaaatatcaccctcagcccgcacggctggaattctctttgccccaattaggagaagccattatgtcccgctccactggaacccctcctgtgtttttctgcaatgtaatttggagatcacttgcatttaagtatcccataaacaacatcaccatctcatctattaaccagttctcagaccacagctcttcagagggagagctttctcccctaacccatccctggcactgttcgcaatgtctctgagaaagggctgcaggcaagtgtcgatccagccaaacccaggactcattagggcctctcttaccagtgtaggatttgcagcacttaagccataatagacatcagagaatggacaaaaagtggaatggaaaatacgctctcaaatgcagtagaaagtgaaggtcatcattgctattcagagatggacagaccaagtaaaaagcaccctgttctttgaggagaccgtctccccactccacagctgatgactggacacctggatctgctgctctgcagagaaattgaaagctcacagcaaatgcttagtttttttctcttctgttcatcatactgattcagggaatccaaaaggcctggtcactgaaagtcaagtagattttctggggagacggggtggtgtgtgcagagccatggaccccaaatttcagcgagcagggactcagctctctgaatttttgcatctgcaggcctagtgctatgattttcttagtattgttttgctctttcattatttacatgcgtgatttgacaaggaaattttactctcccatagtgaatggaaaaatctctatcacttgccacaaataggaaatatccatcataatgggtgcagacacattagcataataattgtccatgtatcaaccaaaaccatctctactttgctttgggaaatgaaggttaaagggacaagagctttggaataagttttggcccacgactggaggacgcggatggccgtgttgttatttgtgggggttttttgtgtttttctgtttgtttttgagacagagactcgctctgtcacccaggctggagtgcagcgcgtgatctcagctcactgcaacctccacctcctgggttcaagcaattctcctgcctcagcctcccgagtagctgggattacagatgcacatcaccacgcctggctgatttttgcatttttagtagagacggggtttcaacatgttagccagtctggtctcaaactcctgacctcgtgatccgcccacctcggcctcccaaagtgctgggattacagacgtgggccaccaggcccggccccatgttgttatttggaagacaccaaagcgtcacaaaatactagaaaagcaggggagccttagaaaacgacctctgcatggagaatgctgaggtccagagcacaggccgggcttccctaaggcaacgcgctcaggtttgtttcgtaggaattcattttccctcccctatgatgtttttttttttgtatataacaaattatcacagtatgtttctggttttgtttttgtttttaagaaagttcaatcttatacattgatttctgagcacttatttctggttcaaaaagcaaaacctacaaaagtgtggggcgggaggcatctttgtctttgtagcctctctcttgccacccactcctcctgggaaccagctagcctggggatgcacagggtatacacatgccagtgcacacatgtatttttttcccctttttaaaataaacacagatggtagcatacgatattgttctgcaccttgcttcaccagtgcaatgacgcgtctccgatcactatacaatgagcctcctgcttcttttttttagtgctacgtggtaattccatcacaagggagaaatggggtttatttaaccaatcctgtgatggtacctgcgttgtttctagtctgttgctattaccaacggctccacaatgaataaaccagtatattcatcctttgggcctgcgtgaggacagcagcaggataaattcctagccgtgtcattagcatgcgtcttagaatgtcatttagcatgtgtttataatgttcccatccccgtgggatgaaggttctgtagcaaggaagtcaagatcaggggacatgggctcaaaagagttgctttttattttctccatgtcaagaaaatgtctctcccagcctcagtctttagaaaaaaggataattcagttggggctgcacacccctgactgggttctctatgaattatggattttttaaaagacaggaagcgaggtgagatattgcattccccaaactggttttatcttgctcaatttgaagttcgtcttctcattctgatgtcaggcactggtgtgcagggtggccgcagaagcctctctgtgggccttctcacaattagtccttggctttatgcgatcccaggaagcgagggatttgttttttcagcgttcgtgggctcatttctgtggttcctgtcaccctggctgctggaacacagcctacctgtcatgtcattatttgtaggaaaactggagccccggtcccacacctcacacggcctagtgaggcttgtctgggggacttgggggtgtccagaccactaggggtcctgtctgggcagtaggctgtcttggagggggtagacacaaatggaaaatttttgaagatggaaaacatgagcagtgactcagaaatgcagcaaaccagtatcctgactcaggagcctgcgttatcactacaaagtccactcgtcagaacacccagcaggctggagccaaggggtctgcacccgtgtgactttgtcactcccacactagcacgtgcccttgtctgtagacacgttcagttgtttggatttggtggcggaggtgctctgatccctctacaatgagccttctgcttcttttttagcactacacggtaattccattgcaaggcaggtatcgcatctcacaggtagaggccagggttgctgttacacatcctacaatgtccagtccacggccctcacaatacagaatgatcccaccccaaatgacagttacaccctggctggaaaaaccagacaaaatcaaaatcaccccgggactaaatgctatctttgcaaggtgggagtgcccattccacacaccctcaggacaggaggttcgccgggcctatccgtgctcctccttctcaggccaggtacctggcaaatagggggccctcaccgaggccgggtctcctaagtcactatgctgcaaaaacccacacagcatctcggaggggaaatatgtgagggaagtaatatctcaggattctcaacgatttttctcctctgagctcagagagcttttccaggacaatgttactttatattcccataatataatgcaagaaggattgctcttctcacttccagatagacatatttcccggagagctgctcctgacagctagttagtgagggggctggatcagaatcgataagtcctgaagcccttttttatttttacaaaatgaaaacagcttttttttcctgattataaaaatgatacatggacattgtttcttaaaaaattcaaacagtacagaaaaacatagaaaaataaaaaatcacccaaatcctttcaccaagagataaacaaatgtagacatttgggtacatgtctttctagctctttctctgcgtgcaggcatacacatattttaccaacaccgttttacctacatcagggttccaggaccactattgacatttgtcgctggattgttctctgcggtgggggccttcttgtgcgttgtaggatgttagctgcaccccagcctctacccagtagacgctacccaccccagtcatgacaactaaaaatgtctccagacattgccaaatgctcccctggggggcaaaattgccccagttgagaaccactgagataaatggaatcatgtacctactgttcggtatgaacccgatgtctggaggaagaaaagagtaaggctttgtcttaggacttttgtgtcctttggttttttggcagcagagtccagggtcaaggtccactctgatatttacaagggaagaactttacgtaaatgaccgccctgagcctcagtttccacatctgcaaacagggacagtgacgggacaatgcctgtgccacaggtcgttgaaccgcgtcccagaaacgatgtgtgggaggggattcctgtggggcccatcgaaaccctgcctggtgggtcccactgtgcgcctggcttcctgttcctgtggtggggactgggcaggggagggcaccccaggctgagcgattctgggcaccatggctgagcagcagtggtggggctgacgaaggcaaaagtcgtgacgttctgtttgtgggctttgttttttaattcaattcttttggaaaacagataagcacgagtctgcttcaatctagtatgctaggtttttggggtgttttttcatgtaaactttagtttcttttgagcttcagatattaagaaaaaaaaagacaaatgtacaagatcagtgggaggcttaagcaaattggtttattccactgggtggggagtcggggttgatgagtcacaatcctggttttgtcggatttttacaaagtagcctgtggtttcaaaaccggtgaaaagaaagaagacggcagcctctcttgctgttgtcccctctcccaaaccctgcctccatttctatgacatgccctacctcacagcctgaggtggttgagtcaggcccccaggcccactgtgggccaggtcctcatgtggaagggacatctgcggaatgatgatggtgcctgttccctccttaaggacgacatcagaccctcctcgtgttttcctcttttttccaacaaaggagcacagttctgggatgcgagctggccccacccatgctccgtgcttacccctctccctcgggcacctggtgtccccaggtcctctccccagggcctttgcacatgctgttccccactggtgcatgctgcctgcccctcggccttgcggccacagcaggcgccacttcctctgggaagacccagctcttcccacacactttgcagtgtgccggcttcagagatgacctgatcaacctgtctcctcccaagcctgagagcaccccggggttggaacctgactcattttgcccaggactgtatggactctggggataggccatgatatttgaaggaaagaggtagggaagaaaggagatccttccatctttaaaagtgtgaattttttttgttgtttttttgccttccacatcgcaatcttccatattcaggtggttcaggaaaacaggagctctcactgcctactcctctcttcctcttctgggggccaaggtgagccactcccattagtggattcgggagatgcatccattaggccacctgcccatggcccgggtggccgcctctgccgccagccggtgcgtgggagaagcgatgacccagcacttccccagcatgagtgaccaaatagccgctctagcctttcccaagaagccatcctctgtccataatggagaaattatgtgaggcgtaatttatagtaaaaatcaaatgaacattaattctggtgagtcatccatgcagaaagggcatcggctatggatgtgggctgccgccgagtacagctgaatgtttaatcaaactgagccaagactgcgccacaggttgtggttcctgaagtttggaggtgctggggtttgagccctccccatggccgcaggatacacctacgccacctcagaggggtcctgagctaggaggggacttggcgaatagtccatccacctcctttattttacaaatgggcactggaagaccagtggggagacaccaaactcatcagcaagcctctgccccccagcctccccatccctgtccacatggcggcccagcccacatcctccaccactctccctgctcctcacagctgcgggcagccaccttccaggctgcttagaccctgttcctcttctgtctgccctcggtcacctcctccctggttcaggtactgtgacattgtcccaggaagactccaatagtaccaactttccatgtctcttgacttccactctggcctccaatggcattctagaaggaactttacaaaatgcaaaatggggtgtgtcactgtctatgtgaaacaatggctcgcacccccggggaaaatccaggctggagggcgagaggaggtcaaggtcttcccaagcggtcgtcatcctcacgtgggcacctttcccttttgcttggctgtctggccacgtcctccaggaagccctccctgtaccttcctgctaagctcctgctattcacttggccagggtctgtctcaggcatgggctttaagctccatgaggacaggctcatgtccatcttgccctcctccaggcccagataagggtctggcatgcagtaggtgtgcatttgtcttgtggactgtctgcttggaggcatggatgatgatggcttgccacagggagctggtgatggtgctagggacccctcttttcttcctcttcccctggcctttctaggactgtccagaaggaagctgttccttcagaaagctgaggagggggcaccctcattcccaccctcatccctgcctttcacttgacattgcagcaaggccaggtgtgtccttccacccggcctggactgcaggccagtcctcccaatttggtgtgaaacagcaggccacagatggctgcattcaaaggcaagtgcaaatgcctggtgcacgagcacattttctttttgagagggtggcatcagcccagattcacctctaattacaagaccgtcttgccttttgagaaagtgaagaatttcaggggagtgtgggaagatgtttgtgggcaggcaggactccccggctctccttctgccaggagtgcgctctgggtttcttagacttgtggaaaccactgccaacagccaggaaggcgggaccgacagagcctcaggccccaggacatctctgctaggcggccccagctggccagcgagtctcttgaccatggccttcgttttggaggcagcttgggtcttccctagcagcgtgtcccacactgtaaacaggagcatgcagcagcttccagggcaccccacaatgccctgcctgcacccccactcaaacccagcacccaccccctccatctcacccactgcacatctgtggctccagccaaagccccaggtgcctcctggacactgacccttccttcactgcctgcgctgcccacccaccttccccaccttcctcatgtcgcccccccgtaatcctctctcacctgagctgccacagctgccgggaaaaggagcttctgctcacccattacgggcgtggtcatgtcactcccacatgcgcgcgcgcacacacacacacacacacacacactgcacaagttcagatgctacaagtgtacacacatactgttatgtgcactcacacacacaaatacatgtgcacacaaatgctgcacacgtgtgcacacactccacatgcagctatgttcccccataccccttcatcccagaatgtccccaccatgtaggtggaggggcattatctctgtgtccctcccatggcccacaggggactcaccttctctgaccttgcctgctgctctcctcttcccctggctcacatgtgggagatcagagcatcaggtgtgagggtgttgggggcaggctgcaatttcacagccctgtttttttctgtagcaccaatctctcccagaaggcgtgatgcctccgtttctctgtttagagtctgcctgcaccactcctagctcatgagtgctgggtcacaactgtttatatctcacacacacacacacacactttaaataaactttttattttaaacttttagatttacagaaaagttgaaaagctagtgccgagcttctgtgtctccaacacccaggttctaccacttatactgccatgtgatttgtcaccacgaatgaacagtattgcctgaagcccgcgcagtgtgcagacatcactggcttctccctaatgccctctctgtgctccaggactccatccagaagcctacgtgacatttcatcatcacatctcctgaggctcctccaggcttggctgagtctctcagcttttccttgattttgataaccttgaccattttgaggagtgccagtcaggtattttgtagattgtcccacaattcgggtgatctgatgtttggttcatggttacattgggatgatgcagttggggaaggaagaccatgtggtatccagggtatgtattaggcacaggaggatccctgatgacacgggcctccagctggctaagacacagctgcccaggtttctcctcagtgaagaccgtttcccaccttcaatgtgtactctttggaagcaagtcactaagcactgtgcatacttcaggggtggggagctacgttctatctccttgaggggaagtatctaccggaattatttggaattattctgtgcaagagatttgtctcttccatctacttattgaatgatttatatcagtctggacctgtggatattctatgcattgggtcacagtccagttctgctttgctagtcccatgtcccagctgtgacccttgggagctccttctgtcagctcctgtgtccctgaaacctgccgccattgctggggtacttccttcctgacaccacatgatgctccaggctcacctcgcagtctttgctccaaccaaagaataagtcttttttttttttttgaaacagggtctctgtcacccaggctggagtgcagtggtgcaatcccagctcactgcaacctccacttcctgggttcaagcaattcttgtgcctcagcctcccgagtagctgggactacaggcatgcaccaccacggccagctaacttttgtatttttagtagagatgggggtttcaccatgttggccaggctggtcttgaactcctggcttcaagtgatctgcccatctcagcttcccaaagtgctaggattacaggcacgagccaccatgctcagccagaataagcgattttcaccaaaagcctggttccttttatgggagaatggcgccaccaactaaggcctgggtggcctcactgcttcaaggtcctctgggagcccctggaaagaaccaggcaataaaagggcatatactaaccctctctgcacacctatggagacaagtctttctctatccaccagactctgtattaagcgacacatcacacatcaccaggactcccgggaagtcacagattttctctatgtcaacgatcctgggccagcagtttagctcacgtttacagagagcaaccagccaggtggcaaatgcatctatctttttttggcgttggtggtggtggctcctagcatctagctcggggagctgctgaacactctataatccccaggacggcccccaccagggatggaagcagccctgaaggtcagcagtgctagggtgaaggcctggggtgcacagatgccgcaggagggaagcctgggagagccgctgctgctcccctgccccgcttcatttcccagcatgccgcttttccacacacgacacagcccacccacttcctgttggtggtctgtctctcccctccagaagcaagctccatgcagaaagggctcttccctcttctgtgactgccgtgttccacccacatggctgggccctcgggagggctcggtgtctaatgatcccatggggaaaggggagctggaatggggcagaagccaccagaaggaaggtcagccttggaaaggaatcacagtgggttttcccgagacagaggggcgagtggcaggtggggtgacagaagggaggccaaccctgcagcagggctgggggcagtgagggctgcagggcctgggggcagggctcccatgaactgtgctacggcacagcccaggcatggggacacccaaaagagagggctggggtgccagccttagcgggaacaagcagggagccccccacacccccacctcaagctatgtctcaaggcctgagcccctggggcgtgcgcttgcgtgtgagtgaaggcctctctgctctcttcctggccttccccagcgcccctggcctcttgccccattcacacaaggccttttccgcctggtacctcagctgtggggcctggctggtgtaactcatggggccccagtggggggcagaggggccactggtttcctggcctgctgtctccaccagggtctggatccaggcacttctgctgacagcgcccagcgcggggccaccatgtgcccagcggcctcctgcagagaggcccctggggaagctccccactggccccctttcccctgcctaaggggaggccacagccacgggaagggctcaagaatggacttcaggggtccctgagaccccagaactttcaactctgagtgacgttcttgcactgggaagggccactgttcctgcaggtccggactctattttggagactccgccagctctagcaggagggaggctcacccttgcttctgccctcaggacagatgtggggacactttgcaccccaagtcctcctagccatgcccggcacctcccaccaagtcttgtccacacagggagcgtcaggccaccctgcctgtcacaccccagttgccttcctgtcttttcatctttttgctctgtccatccactcatccattggtccgtccagcaataacctgagacctgctccgtcctaagtgtatgagagagttctgccctttggggtttagtctggtgggggagacaggtgttaagacagtgagcccgcaactccccgctgcgctaatgccatgaaggcagggccagccgcagcaagaggaatcacagtgggggcaactggttccacgcaggagttgagggtgccatgtttccagcatgacccccaagcagccaccatgagtcagaagcaacccaagaccgtcagacactgcgcacttgcttcgaggactctagcaagcagagctgggctctatgaagagtaaatacaagagcaaacatccaccactctttctacacaagtttattaggcacctgctgggtatcacgtgtggagacaagctggacaacgtaacaatccgcaaggcagctacggccttgccctggagctcccagtctagcaggggtggaaaacaggtaagccccccagcggaagccccagacctggcatgctgtgaggtcggggaaggagcgggggctttcccgaggaggcgtcagtgagggtggagagagcctccggaaggggagcgggcaccggcgaggatggcaccgcatcctgcaggtgctcgtggctgagggtgggaggtaggtaaaactcccggcagtggggacccacgggagactgtggcagaggcgcggcacggcgagttcaccattccccagtgcccggccgccccaggggactcagcagctgacatgacaggggcccctcttgtatcgactgtcctgtctccactcctggcacacagctgcgggtgcagcgctcttcagagcccttcaggagagcctccacccaaccctctgaattaggcacaacaggattgagggggggccctctggaagggtcctttctcctcacctcccacatgaggctgggcctgatttcacaatttcactcaggatcttccctcctcaatcctcccagccctgtcccatctcagtggcctgtggtggaccccagatccacagacacaggccctctccgcacaagggctcacgtggtccccagccaaggcccctacagcactttctacggagccctcttcccaaacatgcacatccagcttgcctctcagccaccccgcctccatctcagctccaaggaggccttggcagcaggctcggggcgccatggaacggttcactgcgtctctgccctggcctcacgtgctgccggctggccttgccattcatcttctgaaggctattctctgatggctctgctggccaccttgatctgagtggcaggtctgtgctaacagtgttttgtgtggggccctgggagaagagtccatgaaccactgcctaactcaagtgctgccacggtgaagcacccctgcctagttctgaacagacgcagcacatcaaaggggagccggcagctcactcctgagcaaagcagcaggctagttcctcacagtcaaggaaaaccactgggagaacctccctgcttctgctgaagacctgagctgcttctcccgggtcccccagtgctgacaggcctctagcatcaggtccatgtggctgattctggagatctttaggaggatgggactggctgttgagaactgtcagtatgagtctgtctggctactctgcctgggaacattcactgagacataaagaagatattaaatagctggaaaattaggaacccagctagggctggaggggaggtcttagaggatcattctgtaagtgctgccggggaaggaacaacggtgagggctcaggctggctctctctagggtcctccacaggaggaagaagaccacaaatctaaccagcctagcagccccagatacacagagcacatgtggacaaagctgtggctgcctgcattccatgggatcatcttgtatgcagcagtaagaagggtctgttctatgactgctctgctgccttttttttttttttaacagcagctggtttggagtctcccacgtattgcctgaggtggtttggtggtaaccagctaacaaaaatcctttcattttaggtgcctgtgggtggtgtggtcgccaccaagaatgagtcaagccatttctaaagaatccacagtaggctctgtctgacagggtgcatctgggagggcctgccgggcctttattcaacactagatacgccccatctccaattctaatggacatgtgcagaaaatgtgatacagaaacctgcagagcagccagttcccagcggacgtcagagatcagctcttacctcaaggatcttgctcaccaaactctctttgcttatcaaacctttctttcagagggcaaaggttaactcccatctagaagaggttgaagtactatggttttcaaaccaggaacgtggcactaatgaggcggagctctggagaggcacagctgcagaaggttccagggacccttggaagcagacagggacccttgggagcagacaggtttggaataaaaacaaagagaaaaacagggcaaaggattaacaacagaaatgaaaccaggcgcacacacactcacctgcggcatgatcgcctgcggtcacactccaacttgatatcttgcttccaacggccagaacggccatcagtggaacttactttcacgggcaatctttaggctgttgtttattgttgatttaagagagaagcagttatggttttgaaaacatggccctttttctgatggggggagagcaggtttcaatgaaatgggtgtggagtcccaatctccaaggcctttgtgtctgatctgagagaagccatctgccagagtcaaattcttcagggccctcaagaacagagggcaagaagccaggcttagataagccttttctgaagccctctggctggccagagaaaggaggcagggctatggtgctccactgatcctgtagggccggggcaaggaatgggaacccaagcagaaaccaggcaaccaaccaggattgtttccatcatgaaacaatagagcaggcaaacccatctacctctggtcccaacctttgtcacggacaaaaaacccagacccacacaggtgaccacgacctcagtgtgaggtagaacagctgggacccggactcaggtccaacaggtgcccagggcaaaggggtcctcgcaccccgccccaggtgaccctcccagaaaaggggtgctgaatgctcatccgtactgcctctgcggccgtgccatctagtggggaggggcttgggcactctgtgccccaccagagcccccaggttctcaatctccagagttcagacgcccgctccagtgggggcaccaggaatggcaaagagatgccttcacggtgttgatggtgtgcgccagccacccatgcacatgacctggtgtttctgtcgtggaactggagatgcggccttaggtgctgaccgctgagccacacaggtggggctcactttctcacctatcaagaaatatacatgggaaacccacagagccctgcctcctggcccagctgccaagacgaggctgagccgagcctctagaagcaccaggtagacgaagggagggaggcaccacagtaaccggagccatacctggcacctggacacctacccgagggagctctccaagggtgccccacctaaggcctaaggaaccagctctgactataggctgagtcccaaagggccaaggaagattccagaagcactagtgaaccttctctacactgccaagccagaggcctcagagaaaggcagcctctcccagatggaccctgtattagtccgttttcacactgctgataaaaacaaacctgagactgggcaatttacaaaagaaagaggtttaattggacttacagttccatgtgactggggaagccccacaatcatggcagaaggcaaggaggagcaagtcacatcttacatggatggcagcaggcaaagagagagagcgcttgcgcaggcaaactcccgttttttaaaaccatcagatctcatgagactcgctatcatgagaacagcacaggaaagacccacccccatacttcaatcacctcccacccagttcctcccatgacacgtgggaattgtgagagttacaattcaagatgagatctgggtggggacacagagccaaaccatatcagatccccttcagtgaaaagaccccagctacccaatgtggggcagctcagctcctgctctccccgctctcttcttgccacaagaatcccatctcctagtcagggagaccttcaagccagcagggccctgctcagaagcctcagggcttcccgctgcacttgcaatcagaccccagtgccatggccgtgggctgcccttatggtgctgcctcctcagctaccccagctccttccctggcccctgctcacttcctgcagccagactggtttcctgcttccctacagctcatggccagctctttcccacctcagggcccttccactggctgtcccctctgtccagtgtgctctttccccagctcctgtgacttggcaggctcctgactcaccagagccatcacctcggactcctccatcagctccatcattttccaggcagcatttgaaaggcgacctctggagcctgaccagccactggagttcaaatccggactccacgattttcctgctgtgtggccttgggcaagctatctgacctgtgcgtacctcagttttcccatatgtttgctatgaagagtaaattaatgcatttctctaatgcctagaacatggtaggcaccataaatcagtaagaggaagggcttctctgtgccaagaagcctgagtgtggggcaggctgtgcaagtatggctaaccctagcgtcccttggaagcctacaggaggagactcacacttcttcagaagatgaggggatcttctgagccttcatgtacatggctctgaaggagttaaggcctagctgtggtcacaactaccatggattcttctctgaggcctggatgagcaagagagaactctgacccactaaggaaaaggagggaattctgaatacgaatacggattaactcaggggccgcctgaggcccacaacagccccaacagaaactcccctcctccctcacctcctctcctcttgaaatccttgtgctgaaaagcaaggcccaggtttcatagcagcctgggcctcctctggctttcctaagtcatccctatcccgacgagaatgagggaggccgagggatgcacagacgttaagtggctatggtaactgccctagccattttgtgtttctgctcagcttactaaggggcccaccaggaggaaggcaggcagccatgatggctccccagacccggccattcaatgctcatccatcagcccaggtcttccagaccaatgtcacagcaaaggcaaggaggccccggccagaactcagttgctgggtccctgcccaattctgatgatgacccttgtttcttataagataataatagctccactttactgcagggagaacaagtgcaaatgcctaaggaggccaggccccactcagagatgagtgacaggcacaagtggtggcaggcacaggggtgtgtgtgctgctggccgaaagggggcggccgcaccccagctacggttgtctatggacaggaagaggcaggccccagaaaactagaggctccactagaccaggagaagtcaaatggccaaaggcttctgtaaaatctgcggacacctaaacgttggcggtcatcatcattcatccttaaaagaactcctgtgtggtcgaaacataccatgtatctgggtgagagcaggcctggagagcagcttccggctccatcccacaatggaggctggtcacccattaatttgtactattaataaaggtggcgaacatttagggacacttttctgagtgtcaggtgctgcttgttcttacttaattctctcctggccccttccctgaagtcaggaaactgccttggcagataaataagtcgccccaaggccccggagtggaaagcagggtgctgaggttagcgctcacatctctctgatgccacaacagggccctgaaccaccagctctgctccctacgtgttcccgacctagggctgggctctgacctggctcctctggccctgtccttggtgctttcacacagttctgtccgcccctggccccagcacctgcgctcttgcctgcccgccacccctggcgcctactgtttcctcatatgatcctccctgctccctcttcacgggcacttcccaggctggcttcttcccaagccttaatcccactcagctctcctggccatatctagccacggcaatgcagtggcctccaaatccccctgcccctccatcctgctgccaactgagcttccatttggcctgtgacatttaaaaatatctgtccagccttggcgtatagaacctaatatccccagctgtttaaataccactgcctcattcggcccccatgcctgtgcgtccaataaaagcagaaactgaccctgaacacggggccactggaaccctctattccaatcatgccattcttaatttggctcctttgtcaaatgggtcatcagtgcgagccagttcctgcccctacaaggagaaggctggcaggggcttggggggctttggagaggcaggtcaaggtgtggccatctgtatgcctgtgacgggcgcacgtgcctggagcatgcggtgatgtccgccacagctgtcctccatcccccccgtctcccgaccccagtgggccccatggccttgctattaatacagtgcaaagaggcccagcagctggccggggccaggtctttccacatggatggtgacaactgccatcaccctggatgtgggctctgcacgttcccaatgtgccttctgtcagaaggggcagagctgcagtccgctggggtactgtctgctgaaaatgtccactctgacttggcaatgggggaaatcaccaatgatcaacttgggagtcgtgaaagggggctcaaaagatgagtggtcgctttagagcactcctagtgctcacaggaacaagggtctgctcccctaaccgcgccatcagcctgcatttgcatggaggccccaggccacaggcttcttctctcatcatcgatacataggtccagcacaatgcccagcacaaacatgcagccaagtacacacctatgcagcgaggaaatcccccacagggagatacagagaaaggcttcattttcctgacacgctctctttggggaggaagaggtcggcttcaacatatcctaaaagaacccatgaagaacgaactgttaggtggatcagagccacaaatccagaagagaagaacccagtctactgtccaaaactgccaggggtgaaacactatgatttctgggatttgctgtgaagggctccagaagaaaaggtgtggtgacagaggaaaccagagcagcagaagctgacgggcagcgcagctgcgctggcctcctctctgccttggtgtgcttgaaaatttccataacaacaagtttaaaaatacacatgtgaaaaattgttcaacaaatatttactgagggcctaatatgtgctaagaactcttctgagggttcttaatttgtatagaaagaagaaaggtgagcaaagtcccaccatgctggtcagcagcagctcagcctcaaaacaacctccttttgccatagcacagcaggcccacccccaaatgccctgggttggtttcagctgtcccatgccactgacccatggaggcagtccgaatacgtacttttaaaatttagtatttaaaaatactatcattcaacccctgtgaccctatgcagcccaacccgagaaagaacacagccaagaacttcatctagcagaatgtccttctcccactccttgtggtctcccctgccagaagaaaccaaatgcagaagctgagtttatcatatgctcgctgtaaacattttatcatgcatgcattacttggttttgcctgcttttgaacttgatgaagagagcattgtactttctggcatcctatcaagaactgagagcactatgggagaacagacccagctcccctcacccaatccccagaaaagctgggagtgagaacagaggtgagtggatgggttctgtgagaggccttctggctggaacactgcttcagagcatgccagcaggaagtgagaagtgcccgggctcatctcgctggggcttgggacacagctctaccgactgtctcttggctgcgtccgcaaacataaacacgtgaagtgggagcaaatgtcatggtaaaggcagatcaagacaactccatctgttgacttattattagacaacaaatgtcatgggaagaaaatgtgccccaagtaatttagccccgttgaaactcaacaggcttccgctggttggaatgagaactcttcctacctctccttagctaagaggcacctgaccagacactgggagcaaaacctcatttatcccctttggtgggaaatctttgtgtcctagaagaccatctctcaccatctctcctagagtccagatgagcatttctcaggtcaatgaagagactgggtggatggggacaggatcaaggaggtgctcagggctgcacctggagggacatcagccacgctgccatttccagagcatgcacttgtcttcatgagtatttttaaaatacttaaccagacgccagggatactggtaatctttcaatagcagttgtataattttcctttaaaaaccaatgtatttacataaaaaaacagctgacttagagagaagtgtgaagtgcagttcagtattggaatatggcaaaaaccgtgaaggtggtgcgaaaataattgaagtcagcaaaaatgacctcgatattcctaaaggggtggaatttttgttctaatttctaaggtacttttgcgcttagatggttttaactgtagtctctgccaacaaaggccactcataacccccagtctgaacggaccctaccctgttcaaggcccagagctgtggggcatcctagccctgctaggagaggctgcaatgctcccggcatggacgagaggggagcatggaagcccagagtccctgccactgctgctgctgcacaaagccacgacaactggtggccacaggccttgtgtctctcaatcagcagccccaagaaaggtctctgagagtgcgccattctctttctcctgagcttgctcttttgcttacctttagacgatgacttcagcgagaaagacagatgagcaaatgtcactttcatgcagatagttcacccaactgcataagtgctctcaatgggagaactttcagcacactgaagtctatttaaaaatagtgggagaagggaagttacttctcttttaaaagtgctaataataataacattaatacgaattatttgtagagttatgtgactgaacatatacatttttttgcaatgttgtcatactactattaacaacactgctgctgtcatgacgggagggctgggggcccaaacagcctgctctgctgcccctgtcatcccagcatccccctggttagcactgcctttcatgcataaaaatgtcccaggtggatgacaaatgttatggtaaccctagttatacaccatgactaactcatctatgcctacgacgagtgggcagggggagggtttggggccaaaggggaacagggacctgaatttcaaaggctggagagcattctttaaattgtggccattcccggcttaaactgtttagatcctggattagcagaggggacctgggtttaaaatgatcagatggtgagggagagatacatgatttataatcggggagagatgcatggtttataattggggcactattaagagttctccaatggcagtttgaactatgttacttctttcttttcttcctttttttttctttttttagacagagtctcactctgccacccaggctggagtgtagtggcatgatcctggctcctggattcaagcaattcgcctgcctcagcctcccgagtagctgggactacaggcgcgcgccaccatgcctggctttttttttttttttttttttgtatttttagtagagatggtgtttcatcatgttgccaggctggtcttgaactcctgacctcaagtgatctgcctgcctcggcctcccaaagtgctgggattacaggtgtgaggcaccgcacctggctgaactatgttatttctaaaacagctcagtcaccttcatgaaggactaaaagaaactggacacagaacctgggatacacttggcctctcttttctaacatcttttagttaggttttccctagccctctccttgtggcaaatttctgagatatatttcactgaagttcaacttttcttgacaggctagagaaaatattgatgaagccaaggtcatgggcctcagaaacccagccccacaagcagagcaggaaaacagctccatgccctctctcctgactcatagagggcctggggatgccacaggtcttactgtctcctctaccagaaagaagagggtcgtgctagcaggggatgggagacaaatactcaggccctgctggtggggacacactggttgcctcgtagagaagtgcagtgtagccaaggctctgtgttggcctatgagcagcagctccactgcttgatatcatctccagagaaacacttgtgacatttacatggaggtgtgtactacgacatggtcagcagtgcagtttctaacagggacaaagtggcaagagctgaatgcacgtcgacagggatgtgactgctgactgtctttattcagcccagacgatgaggtgatggtgaaatagaacaaggcaaatcctacaggaatcagcaggaaagggtctccaagatatgtagatagatgaaaaggctgcaatgtgaagcccaatgaaacacatgaaactatgtttgtgtttttcaagatgacatcctctatggaaacccattatttgtgaagttggtaacctctgggggatttgagaggtgatgtatgaaaactgtggctggtgcagggtcatcaaagcagacattagccttagctttatcgaatattttaaagctattagataatacatgtaattcatataattgcatgcgcagttacacattatagttaagaagtcatggctgggagaagctgctgatatgttatcagtcacagtgtagacatcttgaaaaaggatctcgagaaaaatgaacttccctttcttgtaccttaatgctcctattttaggggccaattttaagtaataactggtgcttttggaacaaccaagagaaaaagagagtgccaccaagtcctactggctttagccttggccaaacccttcccggctgccatgtggactttgccaggctgattactaaagacatggtatagtctatttctaccttccaaaccacttctagccagctcttgctttgctctttctttaataaggagctggaggaatgtcagttctaaagtgatcaagaaaagaatgtgaagctgtgaactgtccatttggttgctgacaaaaaatagatctgatatcaagggggctgacatctgagcccttggctcatgttccaccttcacgggaagattctctgcttggtgtagtaaacaattgagggatagaactaggactagaaaaattcagtctaagagtggctttaccactaaccagctggtcccacctctctaagcctcagtttccttacttgtaaaataaaagggctgagactcgatctctccagtgccatccagctccaggatgactcctgttgataatgactttggttggaaactcaatttggagtgttcctctcttgtctcccacttagcactagactttttctgcttctatgacagcctttccactgtgcccgagacctagaacatctttctacctgtctgataccttgtcttgataccttgtcacgtgcagcctaaaggcaccttgttctcaacagaccaaaggcagaactcttagccccaccaccccactcaacatggcagagctcctggccccaccgccccactcaacatggcagagctcctggccccaccgccccactcaacatggcagagctcctggccccaccgccccactcaacatggcagagctcctggccccaccgccccactcaacatggcagagctcctggccccactgccccactcaacatggcagagctcctggccccaccgccccactcaacatggcagagctcttggccccaccaccccactcaacatggcagaactcatggcctcctgctacctcacacctgggcctctttccctgcttctctacctcagtgaaaagtactagcttccatctagttctacctgggtgtcatcctgacacagccaattccccacatccatgttatcaccaagccttgtaagacactctcctaaataactctaaaagccactctcactatcctcagctttatgtatttctaaaaccaaccacctccctagacccagctactatcaactctagcttcctctcaaattccatccccgtactctgtggccagagaggtctttaaaatagacaacttgattttggtccctcatggccatcaggacaaaggcttcccatggtttatggctgttcaagacaacagaaagactgcagtttaacctgttgggcccagagatccctgcccagccctccagattcatctctgttctccagctctgctgacctgtgagtttccctaacaggcttagcttctttccgccagagagctggcaaatacactattcctcgcttggaactgcaccaccctctggctactcctcaacttggaactgcaccaaccccctgctgccacatgctcacccttcagttctcagctcaagtgtgcacgtatcactttttcagtaaagtattccctgccttgcccaaatatagggtggcttcttctgctgtatactcagggggaaaaaaacaaaagaacatctttcttttccagtgcccttagcttaggttataaggagaccttccttagcgcgatgactcattatttccagatccccctcactgcatgcattcaccattgtattcccagtgcctcgcagagtacaggacctagaatgggcatccagtgcagttgtgcagaccaaactctacagcttctaaggctttccattaagaatccactaaaagagaactggaaagtgaaattaaaaagaaaaatccaactcgactgccaactccaactttattttaggctctttctgcatggctgggctcctcaaactcctgccccctcactctctcacctcttggccattaccaccaccataccaccaccaccaccactgctataccactatcataaccaccaccaccacatcaccatcatcaccaccaccaccacaccaccatcaccacaatcaccaccaccaccatcaacgccacaccatcaccaccaccgccacaccaccatcaccaccaccatcaccaccaccaccacaccatcatcatcaccaccaccatcaccaccacaccaccatcaccaccaccacaacaccatcaccacaatcaccaccaccatcactgccacaccaccatcaccaccaccgccacaccaccatcattaccaccaccaccatcaccaccaccacaccaccatcatcaccatcaccaccatcaccaccacaccaccatcatcaccaccacaccaccatcataccatcagcaccaccatcaccaccaccatcaccaccaccacaccaccaccaccacaatcaccaccaccaccatcaccaccacaccaccatcaccaccaccgccacaccaccacaccaccatcaccaccaccaccatcaccatcaccactaccatcacaaccaccactaccatcaccaccaatgctacaccaccatcataaccagcaccatcaccgccaccaggcatagtcactggtcagctagcaagcagaaggaggcaagatttatatccaggcctgtgtgatcccaaatctggcttctggtttctcacctccaaactttctgttgagccctctcataagataccatctattttccctttgaagcccacctaaatactgtcagagaaaagacattagagaaaaatccctttaaaaacagatataaaacgagggtgcccccatttcacccttctctctcctacacactttcagaggacaacgcaaggcatagacaaaggatgaagtcagagaaagccaaaataagtaacaaaaacatcaatctaactggcactactaactagaagaacccaaaagaataaactaaaaatgattttaaaatataaaaagaagtccagatttaccaaatatcacaactgtaaaacccaaaggacatcgaattggaggttcctagattttgagattttagaccaaaatctacgaacagtggcataagccactgtgcccggccagaccacgctaatatttcaaaagaaatgtgtggcactcacatcgggttgccagctgttttgcttttttttaaaaaaatctgctagataaagtcactgaaaactaaataaaagcaaaatttaaaaaacaacatcagcgggcgcagtggctcatgcctgtaatcccagaactttgggaggccgaggcgggcagatcacgagatcaggagatggagaccatcctggctaacatggtgaaacctcgtctctactaaaaatacaaaaacaaaattagccgggagaatggcatgaaccggggaggtggagcttgcagtgagccgagattgagccactgcattccagtctgggcgatagagcgagactctgtctcaaaaacaaaaaaaaacaaaaacaaaaaaagatctaaaatcttttggggagggtagaattcaagcagttttattcattcattcattcattcatttattataaggatttctgatttatttattttcaaagactctaaaatcttaaagcaaaacaaaacccctaattatcatctacaatccttctagaaagaaatgatatcaaaattctaaaaggcaggaagcttatatagcctcaaaatcaagaatcaaaatcaaaagtccctcccctgaataaatttggcttgatgaaagccccactacaacatctttcgttttctcatttcactgtggactggcatttgggaaccgctgacttagttcaactctttccctgatgaggtagtctcttctaccaaatcctccagaaaccttctctgagtgtttgcctgagtaggctgctggttgcctcaaaaaccaaccaattctgaaagtggcagaagatgagaaaaacgtacaaaaatcaataccatttctataaatacataataagaggcctgaaaatataattaaaaaaagagtgcccactcacaatgcaacaaaagcatctaatacttgggaaatatatgatatatattcacatatcaaactcacataggatatattaaaattacatgaagaaaacacaaatccttaatgagagaaatagtgacctgaacagattgagaggccatacttctggcttaagactaaatgcagaaaagatgataatatttcccaacttaatttataaattgaacgccattccagtcaaaatatcaccaaggtcatttataaaacttgataaaaatggttcttaaattcatatagaaaaataaatggacaaaacatcagagaatgctgagatactgtgcagtgagaaggcatttgccccagcagatcttaaactacagtctaaaatcatcattattaaggctgtagggcagtcacgctaagatactgggaaaatgtcgcaatttcactaactgagcaggaatgaaaccactagcaattaaaactacagaacccacagaaggccacaacactccgaggacagagagatgtcttgcaaaactctcttatctcagttgtggacaggaagcttttgtttttgtttttctaactaactgagcaaggtcaaaaatttacgaagtgacaagatgaagatttcctgacagcataaaacaagcctctccttaagtattttccaaggttcatctcaatccccacacagcacctcattcctagaatgcttatggtcaaaaatcacactttggaagttaattaaattcccgttgtcctctaattgtgagtgtgagtgtgtgacacaggctggcggctacaactcctgtcccagaggctcttttgccagggaccctgcaccatctccaccaggtgcccaggcactcaggaggcactgctggacttcttgctgggccattggctccctaaatacacagattattgcttaaaggcgaggatctcctccacttaagtcaaatctcacatgcctcaatgccttttctttttatatgtggctcctcacatgcctgaaaccaaatctgccatttggaaaaccggaaagtcttctcttgctcctcttccctccctcctcagtgaagagcagggagagaagtgacggctgcttcctgagggaacttctagaccagtaaagggaaggactcccaatttatgatgacttttagccgaaacaatggatggggaagcgggggtccagaagtaatcaccagcctccagtgcattctcatttctgacgttgagaggcccttctttcattctcctggctccatgatattttatcatgcacaatgtatgtcactcatgggccctattaggaatcctatcatcctagcagtggaggtgaccttgtagaccaacccatccaacacctcagggttctcatacacaaggaaagaagaagtggaaagaaaaccctgatgtggaaaccaagtatccaccacaaggaagccaaggatgcacccggctagggcactgatctgattatcaactcgtccagatcaaccccacacacacctgactgagacctaaggggtccacacatcctaacaccagcacgaggcaggacctcatcttcactggactgtcttttagaaaaatgaagccaagcgaaaataacaaacaaataccttagaattctctttaacgcaaagcaatgctacagtgaatgacgccgatttctccccagttatcaggatggactgattacagtgcccagattcatttgcctgaagataattgcctcaattatccacttcactttgcacatatagaaatagtcccaatctactggagcctcagtgactagacatgtaaaattggtctaatcatattttgaagagctcgagctgcaaggatttctatgagcgtgtgcctaaaccgtgacaacactaagggtttctcccctccgggctcgaggcgcgctcgctctctccctcccagaagtctgatggggtgagtcagatcctcagcagataagatgaaaacaactttgaggctctctgtcagggctaggggctagaggaaagataggatgtccaggacagctggacaaaagacaaagctatgagccgagagctttcctgacggttgagtggtcctttgcaatcagcagtgttttcacccacagctcactggctggcatggctgctggtgggcagggcagaggtggacatctggggccagaaccccgtagactgggggtgtcctgggacaatgatgtctcaactggctgcaggaaagaaccagacaagctcagtgtaggtccggctgggcagacagccggaactcaagatgaagcaaggcagggtgtcagagtccagggtctgaaccggagaatacagaatgccaagctccagggccacgggagagaaatgagacaccacgtccaagagggcctgtacccctcttgggtactgatgctttgcctgagcaagggggcttctagatgcttcccgttggatccagagtctagaaattgctcctcctgtggcagagggagagagagggagataggcacttatcagtaggagaagctcaacagagcacgaagtgaagagaaagtaagggagctcctgggaagacagctccgagcaatctctacgcacagaacgaaggctcctttctgatcctacgccctttaaaaacgaatggcacaaatacagtattgtaatcccaaaaatggcctggacagaaaccagccatgtcaaaaaggtgattatttccctctattgtttgcttttagctctagatggcattcccccaaatctcaaaatcaggagctcgaggttttcaccatttctactggtgagagccaattgatatcagcgcagtctgaatagcagcaaaatagcaccctagagagctgagccaaatgcttctgcattgtacctggtcctctctggggaacaggcgggaggggccaataccaaattctcggtggggttgagccttactggctgattgccacagtgaggggtagcgagtgctgcaaactccctgaattcatttctgtccaaaggaaagttggaaaagctcttcatctccaaaaatagtcctttccaatgattatccaaaaaatatcttcaagagtgattatacccgctcaccaggcagggcagaaccaatccattatcttgagtttcatcttagaaaatgcattgaggtctgtgggacctctgacaatagcctgcaagccttctgagaacccatgattcatctgtctcccccagggccactggcacatggctttgcacacggtagacacatggttagaaacaagtggattgaaagcaattctcatgggcttttaaaaatcaaaagaaaatctcagagtcagactaggtaaagactcatctctttctgaaaatcacaagatgaactgtacctctgattctaaccagttactcaacttccctccctgtctatctgggctggaatgtattactctacacctgtcagcaatctggttttaatatttgggggcacttcacatcaatgtgtgtgatgttggatggcaggaattgctcatcctcaattacttcgatctccccacagtgcccggaatagtgtcttgatcatagaagtggctcaatttatgattgctaaatagccaatttcatttgtaatttccgagacagctccaggagaggaggcaaagagaaccaatgtaattaacagatggacttgactcatttctttgcttcaacaagtgatgagttgtggagcaaagagcctccacgccctgccttggtgaggaaagctccacaggccgctgggtccattgcacacatctgtttgccctgtcttaaaactgccaccccaacactccttcctgtcactgagccacttgcactttcaatgcttccaaaatagtaaaaagtgggggcgggggggaggatcgtgtccatcagtagagcccccaaacccttctcccacagcctacagaggccttcaatggaatcagaggctaacctgataagactgcggtgggcaccgagttccaaccccacttgctcacgcacaccacgaaaaacatctccagtgtgtggttacctgtcctttgacttcacattgcttctgacaaagcgccaactttctgacagcccactccatgtcagattcttctttgggttgcgctgaaggctttctgctacaactaccaccgataggttctaattttgccctctagagccatatataataaatcttaaggcctcttccacatgaaaatcctttaaggagctagagacaatattcttcacaatttatccgaatcagaagcttactgtatgatactgtagtgagctgggaactgcgctttcctgtccaactggtttaggagcctccctccagcagagacccgcaagtgatatatgcccatactttatttaccagcagacagagagagccccttgttcctcagcccggtaacaacagaggtggttcatcacccacttgctcctttttgaaattcactctgcagcgagcactttttaaagtcacgcacgtaatgcattttaaagagcatctgctgtacggctccatttgctcgacctcggcactaagtgtgagatggaatggcatctcagtgcagtcccccactccttcctcccagagcctgtggtgaatgtacactgagatgtatttataactacacaggactggggctcaaaaatgcagtcttttgttaaatgtgtgtttgctgattaaaatgcatcttgcaaagaaagcgcattgctaatgcagaatctagtccaaatatatgtattatgtaatgcacattttttaataatgcaggcaatctcggtgtatctatattagtgaatcagctctgggctgccatctcctttataggcataaaagcactccatctgaagaatgaagtactttcttatgtacactaaagaatcataatctacctcgttgctgacagctgacattagtttccattcaaagggcatttactagcacccatatattcctgatttttcccccaacgtgccctgaaatcagcttgaataatatatttctgttccatatgctgtcgatggagctgtgctaattagaagaaataaagtgggtgggtcagtgtaggcagactctctggaaacgtgccccattagttgggactcagaagcggagatgaggatttgaaatatacagctctaaatgcccctgcccagtgtcccatgataatatccacacagtgactacagccacgcaggcacctgtgataataaaacccttgctgttccacaggaaaagtggtagagcagggcacaactggaacatagacatttgtccttttgtggggtttgacaagtcaatcctactttatcagactaacctcccaggttcaagcaattcttgtggctcagccacccgagtagctggaactacaagcgtgcgtcaacacgcctggctaatttttgtatttttagtagagacaggatttcaccatgttggtcaggctggtcttgaactcctggcctcaagtgacccacccgcctcggcctcccaaagtgctgggatcataggtgagagccaccatgcccagcccaatcactattttaatgctacaaactaacacagagtgcaagatacaagctagacacagccaagatgcagaaaggaaaacctcaacacatccaaagcagttgctggtctctcactggggtatgaactctgcacttagtggttttaatacgggtgtggtgttgaaggtgtgaggttaagttccatcatggtgagaatggctgtgggtacctgactgactcttcagacaccaggcagaagtaccagtaccaggagggcctggtgggccacccagtggtagagcctctttttttaagattccccatactgactcaagaaggagaaaaggaccacaacccatgacatgtgtcctaagtgaaacaaccttcttgatactcccagggattttaggatgatggctttgctctgagttgtttcgcctttggacttgtcactatggccaaaaaggcaccccataatcatcatggagggccagactgaagacacgcacacctcaaaagcagcagccaggttagctcccactgtagggatctcctcctgtaggccatcatttgattttctagggccaagaaagagcggcactatttactccaaatcttcagccttgcagagtacaacaacacgatctagtggtgtctgaccgccccctagccctgatccaatcattttctcatgtggaattcaagctagattaaacaatgttggtgggtacagagggattctgactgattcaatctcctgattcacagcaaattaatccaaaatatcctttccttaatacaatacttttgttgttgttgttcactactctaccttcagcacctaaaacacagcttggcacatgcaaggcacccaatgagtattgctgagttacctttgttaaaaacctatctaggagccgggcgcggtggctcacgcctgtaatcccagcactttgggaggccgaggcgggcggatcacttgaggtcaggagtttgaaaccagcctggccaatatggcgaaacccctctctactaaaactacaaaaattagccgagcgtagtggtgcacgcctgtaatcccagctactcaggaggcttaggtaggagaatctcttgaagccaggaggcagaggttgcagtgacccaagatcacatcagtgcactccagcttgggtgacagagcaagattctgtctcaaaaaaaaaaaaaaaaaaaaaaaaacctacctaggaaatggctgtaaggggcctccagtgaggattccgtgtcaccctgaactgccccgcaggagagaagtggttgtgtgaactgagagcgcaggaaagacttccctttacccatgctctcagctccagtccacttccagcaccaccttctcagctcaatcgagctcagggcagtcctcagatgggcttgcagacttgcaaactactacctcaaccgtgggggcccttgttgaagaagatgaggtaattagccaattcagactgtttgagcacgtattgtttggaaacttttctaattacagtcactataacagatctgctaaaggtagtttcatgattaatggctgcccgaagttaccatcctcaaactattaagccattggaaaatgctagaggcttaatactcgtgtatagacagaccctcattcccctgaatatttgctatttggggttctgggtttttagctgctcccaggctgtgtttatttccccaataactggggaaactggggaggggcacgaccccacgggagcctgcgcccacctgcccaagtactggacctggggctagcttgccgcttgctccttgccacccgccaggccccccgcccatcgcttcgcccaaatcctttcaaacaaggttccctcctgccacctgccggcccactagggtctgcgccacaggctcggcgccaccacgcagctcgcggggaggtggcccccacctccttactgcacatgcccggcagaagtccgggcgcgcaacttcgcagaacctcactgcccgtccctcctcgcctcagtctcctctgtcctctcccaggcaagaggaccggcggaggcacctctctcgagtcttaggctgcggaatctaagactcagcgagaggagcccgggaggagacagaactttccccttttttcccatcccttcttcttgctcagagaggcaagcaaggcgcggagctttagaaagttcttaagtggtcaggaaggtaggtgcttccctttttctcctcacaaggaggtgaggctgggacctccgggccagcttctcacctcatagggtgtacctttcccggctccagcagccaatgtgcttcggagccactctctgcagagccagagggcaggccggcttctcggtgtgtgcctaagaggatggatcggaggtcccgggctcagcagtggcgccgagctcgccataattacaacgacctgtgcccgcccataggccgccgggcagccaccgcgctcctctggctctcctgctccatcgcgctcctccgcgcccttgccacctccaacgcccgtgcccagcagcgcgcggctgcccaacagcgccggagcttccttaacgcccaccaccgctccggcgcccaggtattccctgagtcccccgaatcggaatctgaccacgagcacgaggaggcagaccttgagctgtccctccccgagtgcctagagtacgaggaagagttcgactacgagaccgagagcgagaccgagtccgaaatcgagtccgagaccgacttcgagaccgagcctgagaccgcccccaccactgagcccgagaccgagcctgaagacgatcgcggcccggtggtgcccaagcactccaccttcggccagtccctcacccagcgtctgcacgctctcaagttgcgaagccccgacgcctccccaagtcgcgcgccgcccagcactcaggagccccagagccccagggaaggggaggagctcaagcccgaggacaaagatccaagggaccccgaagagtcgaaggagcccaaggaggagaagcagcggcgtcgctgcaagccaaagaagcccacccgccgtgacgcgtccccggagtccccttccaaaaagggacccatccccatccggcgtcactaatggaggacgccgtccagattctccttgttttcatggattcaggttagttgcccaccgctaaactggggagcctgagggcggtgtgggagcagcgcaggtggaaaggaggtgagaaggaaaggcaggtcaggggcgagtgggaagagaggaggctcagctggtcagcctgggatcgggggtcagggtgaggcggcgagggctcccccaaacttcccaggatgccaggggcgccctggtggccaaaggcttgttggacggcggggcgcacgccgtgcgtcccgctggagacaacctgaggtctccgagctggtgccccggctacgcgactgaatcccgaacgcaccccagatttggagctgcacacccaaacggcattggtaagtcacttgttttgcgcgcttttcttcctcctagaaagactagtctcaaataagttggccttctcaggtgtccaaaatgtggttcggaggtgcgcgcgccaactttcacgatgtgagagcagccgcgctgtagagacaccgttgaaatgtgcggaaagtaatctgaatgggaatgggcgagaactctagagactgaccacccgggagggaagtcacgcgcgcgcggcgcctaagcagctcagagccggagcccaggtcccagagctgacaattaagccgcgggacctccgcgccagtgcctccagctgccgtgcgccagccttggccgccacagcccgcctcccgtcgctcgcgggacagagaccgcctcaaagagcgtgcgcacctgcccgcgcgcgccggagctgacctctcccggcggcgggcggttaggggaaagtacctgggggaaaggtagaggaggtaaggggacccttggggatgcccctacgggctaccagggttgaacgcacaggcatggtcacgtcggggtattgccaagcttttggcgcagctggtcgggtggccaggctgcatgcggcttagcaggagacgtcctgggctgtttgcgcaggacctctggaggccctcgagatcgtcgcaagtggaaaggtaaagcggaacaagggacaggctggagacgggggtcgcgtctaacatcaggataacttacaattcgtttccaaagagcgcggtacgcgcagagctggggaaaggtgttggatccggcgccagtccttggacgatcagtcgtcgaaaaggaggcaggggccggcggctccggcagccttggggaggggaggcgaggcggcgtgctccggccattttcagcacgggtagagttaagtttaatctgtaacctggaggggaatctgctctgatgacccagcacaaaaacggcagcaatctggtaacgcaccttcggaagggaaggcgtgctctcctcgccagtcctggggggaaagactgataagtgaaatgtctttaaaaaatctcatccgacttggaaattgattttttttttcctggtgtgcgtgtctcattttgcgccggcttaattatacggatgacaacgatttggaggaatagtaaagcgttttgagggcttgagatgaatgacggtcaggttcttaactcctaagaaaaggatgatgatagaaggaaaataccttaaatggtcttccttccaggacctattccgtaggaaaggcgtcgcggcgcccaagacttagttctgccgggctgcagcgcagactgtggttggatgcttttgtggtcttccctagtaaatacggagaaactagtttatttgcaagtggttttctgcgacagcaatgttagtctcagaagtttggaggctgcggaagggctaggcgtgccccgcttttggcttgcccctaagtcgaaattcctgcttaatgtaaacaatgatggtgtgttggctttctgtgacattaagtgttcagtttttcctctggtaatgtctcagcctgagttcaccaagcaaaatgtctctagggacaagcaagaaaaactagggattgtgttgaatttctttggtgtgcctttcaagtgtgggagctatcttcagactgggtattccgggagacccgttttcccacagagaattattcattagagaaatgagcatgttgccttgttgcaggatgaataaacaagttttttaaaagccctccgtgtcgagcccacacctcacacccatcttgctgttttttaaacagaagcccaacatagggatgtttcctgaactgtaagcaatgtaccatgttcacatgtagcgaggaggggcaatctaggaacacacactgtctttcagacagtcttccacaaactgcctcgccatctgcattacagcccaattgtaaaaacctgttacctaccggcacacactctcccccgctcaattcccctcccccgctcaattctcctcccccgctcaattcccctcccccagcttccctctttacaccctgattcaagggtggaaaagccagtgcagaccatatgaagcaactgagagctataccaacccccgaggaaagcacctatggccctccctgagaagacaggattttgctatatagacttcgcaaaccttctctctgcctgagagactggtactcagctccttccttttccagagccatttttagcaacttccccaagcattcccaactcactagtctcccagctggccctttgccccaccctgctcaactggggttagcatctgaataggcccacttgccccttttacataggtgaggtctgcggggtgaggataggctcccaagaaaaagcagatcttatggtgaaccacataggtgaattaccagccacttttaatatttcaaatggagggtgagggaggaggaggagcaggagaataaagctagctaaacatgatgatatgcccccaatattgaagttgtttcctttagtacattaatcatttgcttaatggaaatttgcttttgtgggggaggggagggcgacccaaaggtgctcttgtaactgaacttatctgagctgggaatttatgttgcaatgttccaatattgtgtggggtcaacctgatgtaggtttaaagttttgcaaacaaaactcttttatgttcatcagaattcaagaattagaaatgttacagtttgggattgttttgagatgtttctttaatgcactgcaagcctttctcaccctggagttgcttacagcctttaactcttcagccttcattttctgcagctgtgtggaaggttaaggaggaagaaagctgaaacttcagtgttggtaagaatgaggttttttggttttttaataatctacatggatttacctcaattatcagttattattatactgctcttcaagaagagggaagcttttgagaggaaactgagcagaaaccatggtgtgagtaaagcatgtctcctaactgcttacctggaaggtgacctatcacaaaaaccaaatcactaaaataaaattaagcttccaggccagtgatgtcatgtgctggctcaactgctgctcttctctaaaaaatcacccagcagagggatgagatgctcaaatgacatctttaatccccatgttcaagaatgagagatggaatttcttgttctgttgtggggttttgacactaatgactctatttcctataacttgatgtcccaaactggagcagtgggatctaagacgaaaggcccagggctagcagcccaggttgcttctagccatggtcaagtggccttaggtcagacccaacacccctctgcctcagtttcttctaaaatgagatcgctgaatgagatgatcctatttatccctttcagctccaaatgtctagattgattagcttaagaagcctggggttgtccaatttgactctacactagtgatttaaccctaatggaactcccaaaaaacatcgaaagttgctcaaataaaaagcaccagctaggtatcgcgccattgcactccagcccggcctacagtgtgagactccatctcaaaaaaaaaacaaaacaaaacaacaacaacaacaaaaaaccccgaaaaacaaaaaaagcaccagctaggaagaaatctgttttgtgttggcttcatgtaaattttgtcaaatctgctttacagttggttgcaaaatggtctcaaaaggcagtttagagaatgcagaattccactgtgtcctttccctaaactggaaacacttagccatcctgagagtcgtatttagtgtgtgttttacgtgtgtgtgtgtgttccccaccttctgtccctgaccttggtgtctaagaacaagcttttcagagcaggagcaggcagcaaggttgcaagtactgacctagtactgcagcttggagaggctaaccactgtgggggacggcagactgatgggaacattggttgagtgaccacaagtgctgttgaaagttttttggtaacagttttaagtgttttggttaagctagacctgaaaaaaatggtatagaagctacagctatttgagataaaccagttttctcaacctttgtttttttcatgatcactcccctcttcgcttcttcagacatatgcttcttacttgcccctccccatgacattttaataccatggacatacagctagaccccactgtctgtttatgcactgcaggaccttgtcacagctaagacttgtttgcgcaccgcatcccccaaaaccagttttgcctccatcatacatgcatgggataaacaaagcaagcatttcaaaaacaaaaaaatctggttctgtcaaattaagtgatgtagcacccatttttgttttataatttctttcttacatatcaaaaggccatatgtggggggtggggggcataaattttttactggtatttgttttctttcccttgtttaaaaatctcatgagttttttcaaacgcctccaatagctatgctggtccaagcactagtggccattaattcacagggcagagaagccagaataaacagcctagtgacttagttctcccaaggccaagagcctgcaatgcggggccaccattacctgttgacagtgctcagccagcagaggcaggactctgcctgcaactattcccgggtagaaatggggaggctgccttcccagctcccactgggcatagcctgtgtgtttattttttgtgtttattttagggtaagtatgttacaaattagcagggcacatggctatgagaaaggccaacataaacccaggcagcagggacagagggtaagtggtgacagtaaagtggggagagatttaaggaagacaaaaggaaaagaagaatttgagggatcacagaaaaaaaggaagatgtgggtagataagagaacccctgggaaggagcagaaaagaagatttagaaatggggaagggggtcacaaagccaggaaatttggcggttataaagaaagtcgtttgaaggaataaagagagtcttgaagagagaaaggttgagggcagcttcaagtatctggtggctaagggggttagaaccaggtgcatcaagggacagacttcagctcaacattaggaagggcatttttaaaagccaaatatggcattggagggctaccaatgaggctcacagattcgacaccattaacatcactgtccccctgagagtttcgtacagacctggtccaaaaattccaatttcataggtgtggagttttcatacaagtacttcaattgctacactcaaagagaaagatttaacacctagaaatctagctgtctagctccaaggctaaagctttgggttttggttcacagcaaggttggtcttcaaggtccccactctcaaacttgaggggtccaaggggcacaggccaaagaccggcagccagcagaagaccacgtttcttctcccctcaaccccatgtgagagctggtttctgagtgtcctggcttatgtcgctgtcttaattagatttcattaggaaaatttgccctgggtaattgaggttgttctagaaggtgaaatataccattccccttaaacaatgatgcccagaagcccccagggtggctggaattcccactatgaattgcagaaattttaagcagagcttccactaaagccaaatttaccttccgagattccctctttcccctccaacccccacttttgcctctctcttagttgctttcccatggtgctgttcatcttttctggaatggcctctcctcccctgaaattctttgctgcatcatcagctagtctggagaaggaatccacaaatgtctggacccactgttcaagcacaggtggtcagaggacagtggcatgccttggctgaaacagaatttggggcaccttttgagaaggttgctgagctacagctaattagctgagtgaaggggtctgaactcacgatgggggctttttaatctgagcatatcaagtattttcataaagactttttccactacctctaatatcagccttgcatctgcctctaacctggtatcttgcctcatccatttgaggcttttttcctttagctggcatttgcttcaaacagcctggccacgcagacccctctgcagatagcagtatgctgctgcctccaccggccaaggcgggcagaggagagtctgaagggaaaaggatggcagcagcaagtcttgattgaaaagtaattaattgtacagcttcaaagtctattactactcactcagcactcagaaaacatttgtcactgggaggctgagaagcttcatagttgcctaaattcttttctaccttctctttctgcttttactttttcctcaattgaaagaaacccactgacaaccaatgacatgaatgggctgcagagaaggcacttctgcaaacttcaccacccacctcctccctgcaaagccgcagaccaaaaggaaaatgactaccaaaaaaatactgtttttcgtggtttctgttcccttccctttcacccacctcccttccctctctctactttgccttctctttgttggctacagggataaacccagaaagctgacaggtagctacctaaacttgagatatgccttatgcttttggtaatgagtaagaatcccagaatgtaagtagaaacacaattactcgttgaatacatatgccatgaaagcatcaatagagaggtgagactgtttgggaggcccagggcatcacgtgcggcttccaaggaacggggctgtaatggtgctgttcagagagtcaatggtaaagaaatacacacattctttctattgggggttccatattttcaaaacgccactgtttgccacctgtggcacctgggccatttggctttcctcagacatgcagagtttaatggaagcatgagaaattcttcccatgcctttcttagtacatcaagtgcagacgctattatttttaagtagccaagtatacacaattttcaagtaaaccatccctgggtttcgacagccaatcctgtcctcccctacttgacacatcatctcactgcagccctacactccagcacacagcccctcatgacaggggtcaagaccctggcacacagcgtctatccatcccaactcggccttttttttcaggcaccagcctctcctgacttcctcttccttagctgcataaacacattaatagactttccttcctcagtcctatcacatatttatcttttcccatgatggcaatccatccagcactggaaagctatgtttaaggtactttgctattatacaattataatggcagatcctaaaaaagccccggcaaggttaggccccagacgatgctgcccactaacatccagcactggccatctccctccagatcaaggccatgtttctgtcttgagctagcaaaattatcagccttcaggaggatcaccagacaagccaaccaatcaggccaatcaaggtggaccccagtaaacccactagccgatcacccccagctcttactataccggattcctcaggtccctgtggccttgcaggtgccacaggtgggtcaactcctcgaacatttggccacacttctggggtccctgaccccattactgatgtttcagctcttagctccactcacctaaaggacttaggtttttcagagtctggtagccagtcactacagagaaataacaggagtggaaaaaagggggaatatcagggttaaatactgggatttattcttcctagtcttaatttatctttaaattaaggcaattcctatttaaatctaagggtcctttctcagcttatagtggtgattttcaactgggggagattttgccccccagaggacatttagcaaagtctggagacatttttggttgttaaaactaaggggatgctactggcatctagtgggtagaggctagggatgctgctcaacatcctacaatgcacagggcagtcaccacaacaaagaattgcctggccccaaataccaccagtgcagaggctaaaacaccaagtctagatgagatgtgctgagtggttctgaaaccccttcctctggtgtgctcccatctctcccttctgagtcctccctactcactcctggactgtctccctttttcctgtccagtgcgccaattgttcaagattctattaccaaatgtatttctcccctaaagagttttctctgactccataaattcatctttgtaagtacgattgccaatttgaatgtgtgatctttatctttttctgaacttcagacctttcctcccagaaaatgggctgcaaaaatctccatcccaactgcccaaagttccttaatctgccatgtctaaaaccaaatcagcactgccaccttgccagcccctcccactgacttccctgtcccactcccagtgttccatccatctgggtgccacactttggctcctccatcttttgtgtctttctagcataagagctgctccaggaggatcctttgggacccctcttgagtgccgtccttcagccttcctgcttccttcaccgtgctaggtctctcctttaaacatctcctttgtgcataacccctttcctttgttctcgatcaggatcatcctccatgctgcttctgcttttcctaaaagtaggctcaaatcctcacttgcagaacaaaaaactttcaacatcctttccgtttcctgccaaaatagcctcaaaagtgcttgccctcatactccatggcatcctcagagagattctatctaatttctcctaacttttctccccctgctccccaagagccagccaaggtggccagttgtgtttacccagccacgccccatgtttcctaccattaaatcctttgttcgtggtgggcaaaccgtctcccatcccccactaccaccttctattcatagccaaggcgtctatccttccttggaggcccatataaaaagtcattttctccagcaagactttcaaggtccccccaggtggagttcttttcttccatttgtatgctgctctactctccaggatgaggaactggtatttgtctaacttgttaaatttgttttagtcacctccatgcatgtgctcccctggcaaagctcatgatatcagaaagaatgaacaaaggggtcccacagacccatgagggtgtcgaacagagaccctgaacccgttcctcgacaaatggtactttgggggtgagcgcgaggcctgacgaaagcaaacaacccctttggagcacccatggcagcctccctggggctccaaccccaatgtctactgaccttccacttgtgcaggctcagcatccctggggcctcaactccttatccatcctgggctgctcctcgcagtaagccctctccttggggtcctggccctctacctcccagccctggaaatcttcttgctcctcaccttgcccggcagtggcaccccgttggctgggttagcctgccgccatcaacacacccaagggttggcccctgggaccccacctctcccccgaggctcggcaacctgtggcatgaggaagagtgaccccacggcgctagcggtcctcgtggtcttccaggcctagccgccatacacccgccccccaccggcttccaaccaccccagcagcacctcttcgggcgttccaacgcggcgccccctattggacctcccacccatatccggtttccggtctgacgccccctgctcattcgccaggcagccttgattggcatgacccctgcccaatggctgacccggcgctggggtcggaggggagtgagttggtgttgggacccagttgggccattcagtggatgctcaagtggttaagccgtcttgcgtgggtgtagttggccaaagtttgaatcaaagttcagtgttgacatctggaagtgtgtagacccatagagctaaagcgatatatctttgggggatcccaaacgtttcccagggtccaactgtgttcgcctccttccgtgctgcgtggccacatggatggtggatgcaggggtgcaaggatgcacggtgcctgtggtaccctggctctaagagggatgcattagactaaacgggatcgcaacttgcggtggttcgcccgcctgcagctcttatacagcagcccgtgccgtgcgccctgcttgctgcagcccgccctgtgtaactcatccagcctcccctcccccagggttctgcaggtcagatgaccccctgcctcctgcccagttgctctgtgcctagacgtggctcgccaatctgtctcactggtgagaccgacctgatgcgcacctgccgagttttatgtgacccccttacagcagcttttctcccgggttccaatccctctgcagaccccagaccagagcatagcatgtgcacacatcaaggccaccaggtggtgtgggcatttacctttggctagctctgagctcaccgcagcatggtagcgggagcgcagctgcgcgggcaaccgccgggtttgtggccggttggcgggctcagtgccgcctcagtgggctctagcagtagaaaagtaaagcgactaccctaagatacccagagcgagaggagaggggctagaagggtgctggaggcaggctgtagtggggctaaaggagctgactgaccagcgctgcggccggtgcccgaagcagcgagcagcgcacctcagctccggttgccgcgcggcatggtatttatctgtgggttcagtgcgcacagcgttgtccagtctcgaaaccaccctaaaccggcattaaaccccaaccaaaatcccctttaacccttccctagaacagcaggacctgcgaaactctgaggccgctttgtgaggtcctcctctgcgcagcacgccccccacccctctcttggtgccgccgcagctactccctagggggctttgctcttggtggtacgcacccgagaccttcttattcccctgcgtcaccatccacataaacaagagagcaccctgcttgcgccgctgtgggccactgcggagacccctagagtgtgatgggggtgggggctgttaaagtgctttaccggagccaacctcagcaagtgacaaacaaaagcagcaaaaagtacacccaaggcatttaaaaaacaaattgcgtgcttgcatactcggcatcccctctccctcgcctctctctgcttctttggtgggctcacgaccacctgtcgcatccctacgcgtgcctgcgccccttcccaggcaccaaaagccttgcgctccggactaggggcttgagatccggggctgcctggaggctgggggctatgactcagagtttcaggggtatcctggggtgatgaaatccttcttcagtcccccctcccccgaggagtcggttgggttggggagggagggtttcagctcctgtactccagcgttccgaggcccacgtcttgcgtcacgtgtcccgcaacgcaggagcgctttctctggccagcggagaagcgaggagaaagactccaaatcagtcagggagaggagtggaaggagccaaaacgtccctgcgaggcctgcgctcaccagcccccttacccaaagtcccgggcccctggcgccaggagcaggctcctggagccggagccagctcggcactggaaccggcgtcctctggtggcagagagagagcgctactggcgattttcggaccgaatcggcacgctcgtcagatccaagcaggcgggactggcctggagcaaaaagaaagagagaggagggcgtaaggatagaccaaggaagaggggctggggggcagcctgggggcatgaaaagtggccaggaaggagccaagactccaccagcaacaattgagttgcttcagcctcagtctagggttccttccaggccttgaaccccccaacctcacaagggttggaaagtgaggccggtgaactttccagctggtactttgattttaaaataataataataattttttcaccctagttcggttgggtgctccatcttacggagccccaaacttattttgagaggccgccaccgtgttatgggcgtgcgcaactgcctctacggcaataatatgtcaggacaacgcgatatcccccctgaaatcggggaacagcccgagcaaccacctttggaggccccaggggcagctgcccccggtgctgggcctagcccagccgaagagatggagaccgaaccgcctcacaacgagcccatccccgtcgagaatgatggcgaggcctgtggacccccagaggtctccagacccaactttcaggtcctcaacccggcattcagggaagctggagcccatggaagctacagcccacctcctgaggaagcaatgcccttcgaggctgaacagcccagcttgggaggcttctggcctacactggagcagcctggattccccagtggggtccatgcaggccttgaggccttcggcccagcactcatggagcccggagccttcagtggtgccagaccaggcctgggaggatacagccctccaccagaagaagctatgccctttgagtttgaccagcctgcccagagaggctgcagtcaacttctcttacaggtcccagaccttgctccaggaggcccaggtgctgcaggggtccccggagctcctcccgaggagccccaagccctcaggcctgcaaaggctggctccagaggaggctacagccctccccctgaggagactatgccatttgagcttgatggagaaggatttggggacgacagcccacccccggggctttcccgagttatcgcacaagtcgacggcagcagccagttcgcggcagtcgcggcctcgagtgcggtccgcctcactcccgccgcgaacgcgcctcccctctgggtcccaggcgccatcggcagcccatcccaagaggctgtcagacctccttctaacttcacgggcagcagcccctggatggagatctccggacccccgttcgagattggcagcgcccccgctggggtcgacgacactcccgtcaacatggacagccccccaatcgcgcttgacggcccgcccatcaaggtctccggagccccagataagagagagcgagcagagagacccccagttgaggaggaagcagcagagatggaaggagccgctgatgccgcggagggaggaaaagtaccctctccggggtacggatcccctgccgccggggcagcctcagcggataccgctgccagggcagcccctgcagccccagccgatcctgactccggggcaaccccagaagatcccgactccgggacagcaccagccgatcctgactccggggcattcgcagccgatcccgactccggggcagcccctgccgccccagccgatcccgactccggggcggcccctgacgccccagccgatcccgactccggggcggcccctgacgccccagccgatccagatgccggggcggcccctgaggctcccgccgcccctgcggctgctgagacccgggcagcccatgtcgccccagctgcgccagacgcaggggctcccactgccccagccgcttctgccacccgggcagcccaagtccgccgggcggcctctgcagcccctgcctccggggccagacgcaagatccatctcagaccccccagccccgagatccaggctgccgatccgcctactccgcggcctactcgcgcgtctgcctggcggggcaagtccgagagcagccgcggccgccgcgtgtactacgatgaaggggtggccagcagcgacgatgactccagcggagacgagtccgacgatgggacctccggatgcctccgctggtttcagcatcggcgaaatcgccgccgccgaaagccccagcgcaacttactccgcaactttctcgtgcaagccttcgggggctgcttcggtcgatctgagagtccccagcccaaagcctcgcgctctctcaaggtcaagaaggtacccctggcggagaagcgcagacagatgcgcaaagaagccctggagaagcgggcccagaagcgcgcagagaagaaacgcagtaagctcatcgacaaacaactccaggacgaaaagatgggctacatgtgtacgcaccgcctgctgcttctaggtaatgcggcggactctgcctgcgggcagcagggccgccggggaaccggggagggggtggcagggctgcctggtggggctaggggctccgcagtgggaggagggggtccagccaaaggcgggaagaacttgctagaaagttccagggagggaccctaactgccctgggagcgggaggggatctttggtggattcgggtggccgaagtatatgccctccagggagaaaagtggtgccgagcgacactgagggtcgtttccggctggacaggccagcgccagcaaccgtaagctggacaggcaggggcttcaggtgagccaggaactgccggggaggggccccggggccccgggactcccctggctaggctggtggggtccacggtgggctggggtcattggggaaggcgcgccccgcctcgcctggcacggctgcttggactcagacagcttgtcgttggtgtgtgttggtgtccatattctgtgttcgcctgtgcatgatacgctgaagtgtcccctgttcctatcccggcacccccaaattacccgccgactgtgtacttgtacttgggaacgggctgtgttgtggtttgcgccatggcccgggcaaaaaactttcgctgttcgcacactctggtggtacctgcgcccgggcgctctgcggcaagcggtgcggaggacacgcggggaaggtggcggggcctcccgggaaataagcggggcccttggcctgggggagcggggaatcgcttttcgccggcctccgcgtaaccttgtttctgtatgtctttctctctttttccttttgcgctaagcgtttcctcacttctcattcgttcgccaaaccctcccgcctttacagttgaaaaaccagacacacaggtatctggggcgcccggggctgcacacctcagttcggtattctgcacacacacagctcgcctggtcgggggatgggggaaaggggaaacacaacctgctgtaggcaagtccggatcccaaaccacttgggggctggttccaagggggtgggcgtggctgtgtttaaaaaatatgaaataatttttcttcctagcgaagagcccgaggtaagccaatcatttttacaaagagtacagtaggaggggcttggtttaaaaagatgggggttatgtgttgtgagtggaatgtcacctttgtgtttgaaatgcaactaaaataaaagttttcaaaaaatgctctgagtgtatttgaagtgtgtggacaaagtatggcaaaaccgtgaatatgacttgtgaaaacaagtaaatgtttgcatgtgaattttttcaggcagctttagctgggggcaaagaggcttgtcaaaggtaaggtcttctgcaaattggctctggatacaaaaaatatataaaggtattttgattacagaagttaaaaatcatgatattcttgtcaggagggtattttggtggccttctaccttccccctcctcctctgctcacatttccccacctctcggtgccctcccctctccaggatccccctcctcaccccacagcaagaccctctcctgtatctcccagtctttccctggccattcccagttccccaccctccccccagccccccaagacttcttaacttcaaatctggggcattaaatatttttgccacatttaaacaaagcatcaattagcaatggtctgaatatgtggtttaaatgaaaacttccaaacaaacttcacaagcttaatttttacattttattctctaagactttctctaagaccttccaagggatttcaagatcacagtttttaaggctgcgctacatttgttaaatatgttagaatgtgtgatggttttttattaatggcattattggcatataactgtgctattgtgatgtggctctcacaaatcacaattttaaatgtgaggatcattttgtgtatgcccatccaggtagatcatgacattgtcatttacctaaagacatataatatggtcgttgttttaaatttcaaatgtctcaactacactaaagctaccaaacattaaatgacaatgcactggtttccctgcagacaactgattttgccataacagacccatttcaatattccaagcacagctctgggaagcaaacctgtagattgggggtgggaggacataaatgcatacagacaggagacccaagtgacagtgtgcacctgacccctaattgtcaaattggtgatgtgccttacatgcggggcctcagttgcctcctttgtgaaatgaagctttcctagcagatctccactaaggaatgcttttgcaccatgatttgagtcttctattcttcctggaggtggggggtggaggagacacagtctacttacatcaggactggagacttataccatagattgtgcagccatcaatcctgcagcaaactgtccatgtttgggaccagtcttaagaatattagaagtttcctttgtctccccttattttgtcaccaggagtaaaaattaactttaagaaaaggaaatttgctggggtcaccttgtaccttgtcctggctttgttctcgggtgctggtagccaaacacctttggatgcagcatagtccagaaggtgggctggcaaaccatgggccatgtctaacataagcctgaaatatgatagccagtgttagctgctagctgaaactgtaccactgcagtttgtcaaagcaggctacagtttttgaccaggcttccttttgcagaggtgacgtacctcttctggacctgaattattgatgggggacagggagaggaggaaggatgaggacttactcacatgtaggacaagactttttactaactttttagtcccaacatataaaacaagacatccatacatccctaccactgaaaatgcagatcaaatggctgtcctttgatatggttgctaatttgtgacatgcagattcatctgttgcttgaaaaaatgtatgttcatgtgcttatcctttctgtttttattgccgggacaatttaatctcattacagggaatcctaagaaatcaaagagagagagagagagagaaagatagatagaaatcagtaatatgattaaaattctaaaatatctaaagagttctttttaaagaagcctttttcttactcaacactatccaccaatagactgtttccatgtttctgttacgtttttaaataattttggtggcttaaacattttttaaaacttcatttaggtgtgatttcctccttaagaactgaatggggctaatagatcagagtttcttagtatctgccacatttattaaaattgtgtaggcaaatgctatatataataatggctattctgctatgatgctttatttatacagtgaatcacaattaattgtatgattatttatgccaccaagtgcaacagtatgcattgtattccatcttgcagaagcacctttttatttttcttttctctctctctctctctcttttttaacatacagccatttttttatattctaaatgcctccactgagcttttggtgtggtaggaaggacatggcttatcaggccacaaaattttggagtccagatagatttattattttctcttttcagtctcctagtaagattcatgcttctcaaagtctgaaattctaccttggttttaattcttacagatttctctcaaaaaaaattttcccatataggtagattaatgtttaaaatttacccccattatttacaatggaaaactggttttaagcaaaaagaattgggggtcatccccttactgtatgtatcctcctaacttgaaaaggaaaatctcactgctctcagtatgattagtaaccagtaataataataacacattctgattacattttttgtttgtttgatttgaaacaaagtctccctctgtcacccaggctggagtgcaatggcaggatttctgctcactgcaacctctgcctcccagattcaagcaattcacctgcctcagtctccagagtagctgggattacaagcgtgtgccaccatgcctggctaattgtttgtatttttagtagagatggggtttcaccatgttgttcaagctggtctcgaactcctgacctcaagtgatctacccagcctcccaaagtactgggattacaggcatgagccactgtgcctggccacattttacattttttaaagcctttcatctagtcatatttgtctcttgaaacagtcctgggcaataaaaacgtgatagggccccatttcataggcaaataaaccaaaagctcagagattaaatatcagacacttttttttttttttttgagaaggagtctcgctctatcgcccaggctggagtgcgatggtgtgattttggctcactacaacctctgcctcctgggttcaagcgattctcctgcctcagcctcctgagtagctaggattacaggtgcatgcaccatgcccggctaatttttgtattgttagtagagatggggtttcaccatgttggtcaggctggtctcaaactcctgacctcgtgatccgcccgcctcagcctcccaaagttctgggattacaggcatgagccatcgcgcccggccataaggcacttttactcaaagactgcaaggtaggtaaaggatcacaaatttcaaattcagataatgcttaccagaaatgtgatgataagctataaagcattatttaaatgtaaagcatgattattctaagtatactatgtgctcttaaaatcccttgccaaatgacacgtgtcgagtagtctgctactttctgaattatagcaaaacgcacagatccctggttataaatgtccattgagtatacatgaaacatgagctcccccatttctgagatggctgtcattgctttggtaatatttcatttacacatttgctttaactcatctgccagcactgcaacgttgcagtcttagtttgttgggctactgttttcctttttttttttttaaatgcaggtttttttaaaagttttttggtttttttgttttgttttgttttgtttttttgcagggtctaaagcttttcttcttgtttaggtttccactaaataataattaatcattataataataaaatgcagttacttttctgcatagctctattataagtatagcgttagaatgtttagaatcctggtctggatctcatgatcttatcaaaataactctgctccatagtctttgtagtgatttttttttaaaagtatgccttacttctagtccaggctaatttccatttagcaagagtcagtgcgtggtcttagaaatcacctttgacttttatgcaggaaggttagttgttgttgttgttgtttttaagatggagtctcgctctgtcacctaggctggagtgcagtggtactatctcggctcactgcaacttctgcctcccagttcaagggattctcctgcctcagcctctcgaatagctgggattacagacatgcaccaccacacctggataattttttgtatttttagtagagatggggtttcaccatgttggccaggatggtctggaaatcctgacctcaggtgatctgcccaccttggcctcccaaagtgctgggattacaggcatgagccaccgtgcccagccaggaaggttagtattaagcaaaacataaatttatttttagagaaggtaacctagatttgaaattcccaaaggcagccatgctccttcttctttttagagttagtttttcctccaaataaaacttacccccaaccccagcaaaattgtggctcttcaaatgcctctaaataactctcaggagacacatcagtagtgaacaacaattcgtttctacacttcttggtttcttttagctgtagtagcaaatgtgaggttcctctcaaacccactcacgccatttgcccatttaaaaatcaaatttctcaggaggagtagcaattttcaagagagaagggacagggccaattgatgtcacaaggtcctcaccatcaattaagacaagtcaacggagggaactaaaagcactgggcagcctaattgaccatctctgaccccttggaatagggactaggagactctggccctaacacgcaccttcacagatttcattaaattagactgaatggagcttttgttcccatcagattcctgttctggcctgtggtcaccctaagcataagatcatgttctctttaggaaggaagaggagaatggacctgagcctctctttgggagttctgctgaaaagtctgcaagtcctaagtggcctttatgcaatttagagactggaaggaaggcacgaatataaattgggggaaagaagcccctgaacaaaggagaggagaggtatttcaaaaagaggatatattcttttttttattgagacggagttttgctcttgttgcgcaggctggagtgcagtggtgcaatcttgtctcactgcaacctccgcctcccgggttcaagcgattctcctgcctcagcctcccgagtagctgggattacaggcatgcactaccacgccccactaattttgtattttttgtagagacggggtttcaccatgttggtcaggcgggtctcgaactcctgacctcagatgatctgcccgcctcagccacccaaagtgctgggattacaggtgtgagccatggcacctggcctttttttcttaattcccccaaaaagagggccagctactagaagcagttacaatttgagaaatctggagtcttttttaaagggtaacatgttcaacccagtgcttggcacatataagtaccccaaaacatgttttgggttttttgggttctttttgttgttttttgttttttgagacagggtctcactctgtcgcccaagctggagtacagtggcatgatctcggctcactgcaacctctgcctcccgggttcaagtgattctcctgtctcagcctccccagtagctgggattacaggtgcctgccagcatgcccagctaacttttatattttttagtagagatgggatttcaccatgttggccaggctggtcttgaactcctgacctcaggtgatctgcccaccttggcctcccaaagtgctgagattacaggtgtgagccaccataccaagcctcgacttttaattttagaaatttattttcctcctagatttttttttttctccctgctccaagtgaggttttgggtttggttagttttctgttgttgctgggttttttttttgtttgtgtctttgtttttctgttttttgcatttctcattagactattaacatgtaagttctaaaagtgccagccatctcattctgtctttctgtctccacctttcagagtacattctttgtttacattttgtaaataaaggtcaactcaagcagtagacgaatgccaccttgccacatttataattgtgtgaagtcactctcaggtgaatgatgtgccagagagagatgaggagataacttactttttgacttgtcctgtaaaagtgtcacctgtcacccctgcctatccagctcccccttctgttttgattagctcctaactataaatcaactcaataccgaggctgagctcaaggacctgagcttggattgttctatggttattacacatgaaaaaaaaaaaaaaaagaaagaaagaaaatgtgtttagtttcctttccaacagccagatggtgaaccaggccagctcatgggaattgaagatgaagagacctccaagaaagaggtagggaacaacacaacaaaacaatgtttgacttttcattatgttgatcgtcacatgctctttgagcacacacgagtcacacacctttcaagttagaatcagtggagcgcttttctacatgcaacaactgggagctatgctatgggaagaatgttaggcaactgatctgtgacagggcaatggaaattaagggagtgtgcctctgttgtacttccttagagtaaaatcccaaattgcattgcagagtaatttgttaaacctcaggagtatttaaattcaggagtattttgacttgtggagttctgcccacagaactgcacattggatcttactaaatgttttttaatgattcaatttggggcgaggagagaggtataaaggtagtataaattgttatccaatctcaaatttattatgagtcagtcaatgtttccgacattgtcacacacacactgtgtgtgggacagagtaagtacttttaacttcctttaatgagttgataatgggaaggaaaaaaatctctgtactactttctaaagagtgtcacagttgagctttcacaagctcagtgtcaccactgagtgagcatcgattcttacaaggaaattaagacttgggctgcaagagcctcgcctctctcttctgatttatctggctcttgcctctccccctccatcaaaagaccacactatctctctcctcttttccatttgaacgattttgccattcatcaaactgattgctaatgtgcaaattacatgatggtatttttacagggaacctgcattcaggtaagtttgaagctgtgggatatttgagggggaaaaaatgaataatgcttatcatgatccacagaaactaaagtcaggcattgtaggacagtccagaacccaagaagggccatggacaggacccttccaaaggaaagagaatctcgtgtcccgtgtgttagcgagtatccattccagctcccccagggctctgggacccacatatctgtgcctccatttttctagggttgtagtagctggtggtccagttgaaaaaaatgaaaacaggaaacctgtcaagaatagatagtgttatttaggaagtatataggtacttacattactgagaccacttgaacacatccttttaaatagataccttttttaaaatctatggttatgtaacatctgtgtccgagggatttaagcagaaagccctgtgggtttctcttttcaaaagacagaccttatttataatcagcccctcgatttttttgggggggccttcatgggcttttgaaatcttaggaagtgtccatcctaattccttatagctgctctttctgtggctctactagggccttcaagatgctgaattcacttattaattaaatcattgacgtcattcagggggttccttttgcccactgccccccaacatgggaatttttaaatgactggctctagaagggcccaaagatggtgaaggtgaattgatatttcaggtgaccactagatggtgagacagtataaggcagaaaacaggtggcacgtgtctgtgaaaatgagagggatggccagggctggcaaaggcaaagaagggtcccccttgacttttaatgccagcccccaccccaggacagaccttggattcaaataggccccaaagctttagccagaccagctttttacttttacgctgtgacttctcctagttagctatatgccaggattttagaagcattttggggggctcagtctaacagaggggtcctccaagtggctttattgacattttttcatggggtggttgtcctatgcactgtgggatgtgtagcagcatctctgacccctacctaccagacacacacacacacacacacacacacacaaacacacacgcacgcacactctctctctctctctctgacaaccaaaactgtttctagtcattgccaaatgtcacccctcattgataactactgccctaacatcatcagtatcaaattctggggacagttcaagatcatacatactgtaacttgcgtatcttaaaaatatatatattggggctgggcgcggtggctcacgcctgtaatcctagcactttgggaggccaaggtgggcagatcacctgaggtcaagagttccagaccagcctggccacgtggtgaaaccccatctttactgagaatacaaaaaattagccgggcgtggtggcgggcacctataatcccagctactcaggaggctgaggcaggagaatcgcttgaacccgggaggcagaggttgcagtgagccaagatggcaccattgcactccagcctgggcaacaagagcaaaactccatctcaaaaaatatatatatacacatatattttatattatatatatatcatatataatacaaaatatatataatatgatatatcatataatatatacatatataatatatatcatctataatataaaatacttttttttttccagagaaaagtttgtccactgcagttacttttttttttgagatggagtttcactcttgtcgcccaggctggagtgcaatggcatgatctcagatgactgcaacctctgcctcctgagttcaagtgactctcctgtctcagcctcctagtagctgggattacaggcatgagccaccgtgtccaaccctgcagaagtaatttctagaaatctcagagaagaaagtgacccagatgaccctaactagaatagaaaaggaaattatttcagggaagtaaatagtgagctgactttgattaaccaagtcagtcccatagctaggctaaatcaatgcttaaatagcctttacccttaaatgatcacatcttccacttagggtttcttaaggatgccttttcctgtagcaggctaggaattctctctctgactggtgcacactcaattaattcactctgcattgtagagaaggatgccaagacacgaaggacccatctgtcagatggctgctgacaacgtatcagctctagggtggcaggagccccactttatatgtgttccccaaaacaacagcagagcctttaactgataatgtgtacacaccagcaagcagtgtgtgggccccagttgctgggtctccctagtctcaggcccatagagaaccagcctactgcatggaggtgacctataaactttcagcaactgatctttcaagacagacagttagattgcaggagagaggggcagtggaaggaacggctctgaatgactggactgagaaagagcataagatctctcaggaataatacatagctaagccaatagaagtaacaatccaaggacatttcctggtcaagagtcttgcgcttggtctctgataaagtggacacccccttctccatcctagggcagactctgtaaccattatttcttggaataatcataataggactaaattgtgatcttaattttaaacagtggtctaagcccctaatttgcatctgaccagcctctctcaagtaaccattatggaaggggactttataacttctttgttatattttgacataacacatttacatttttgcccccatttggtctttctatagagttttcagattgtaacatctgaattcatctcatcaagttttcaaattgaaacatctgattgtaacaactgaaacagattcattagggatctaattttttcaaacaaaggagatttttttcttttttttttttccctagggagtttcaaatttatgacctctgacttcattgcaaaggccagaaaaataaataaatagatagacaatgaccactctccactccagacatgcaggtgtatttcaacactttagcttttactatcaggatttctttaggggaaggtgtagaaatatattggtagtttgataaattatatatcagacatgtaaaatttaaagtatcatttgaaatcaaaacttgtctgaagactagctttttatgtcacaagttcagctaagcaaagtgtcccctaactataaaacctccttactgcagaatcctagaaattaccaaaggcaagcttcttgaatgttgattttgaaattttgcctgcgaaagtgcaacatctttccaagcaaatgcttagaagactcagggcagaacccaaaaacaaatgccagacgttaggggaaaatttttaaaagttggattgccagaaaacttctagctatttataattaagcatttttagctgctaaaaggaagcacattagatcattttgttttgcaaaacaaatggccagtgtgggttttaggatggacactcccaggagggctcccctttctgagtgggagtctttggaaatgttcctgatgggatccagtcattctggagcgctcttacgaaatcgttcatcctagggcagtttggtgtttgtgagcttacagcgtttactccttgctgtcttctaccataggtctgatctgatgggggaggcagtgggcagaggagctccagctctttgggagggtcctagaatagtacaaacagcactgggttagaagttgggggttctcattcctgggaccttggttgattatagaactttattctaggattccatgaatttgccaagctgacatcgggaaaaggctaaagtttgattcttgaaagtattgacaaggccccatttaggaatgattctgccaagtattcctggggtcctgccatggtcaggagagcaccttaaatttgatgagttgtcagggaagaagcagagggtatctctgtgttcagctttatgtatgagaaagtcaagacacaagatgggggcaggacagggacagcttgagaaaggaggcttgagattgagacttggaactcaggtgccagggatgaatccaaaaggcttgcaggcatctcagcctcagacttaagctaacatatagcagatagtggacacctctcctgtttctttctttcttttttttttttttttgagatggagtcttgctctgtcacccaggctggagtgaagtggcatgatcttggctcactgcaacctccacctcccaggttcaagcaattctcctgcctcagcttcctgagtagctggtactacaggcgcacgccaccacacatagctaattatgtatttttagtagtgatggggttctccatgttggtcaggctggtctcaaactcccgatctcaggtgatccccctgcctcagcctcccaaagtgctgggattacaggcgtgagccaccgtgccctgccaatatttgtctttttagtagagatggggtttcaccatgttagccaggctggtctccaactcctgacttcagatgatccgcccaccttggcctcccaaagtgctgggattacaggcgtgaaccaccgcagccagctttttttttttttctggccctgcaatcttgattccccagagttagggtctgatttcagatgttaaggcaggctcaaagtggggcatctgctcgccacaagaaggtgagaggtcagaaagaagaagcaagaccattagggctgccttagttgaagaaagggggctcatctctcattttctcagaagtttcacaatccagaaaggggagaacggaaagcagcctcctaaggagttctcgaatttctttctcacttttcctttgttttctcgctctctcactctcttctaagatttatttttaaatggggttcttattttggggggactttctgagcaggaactaccttttttttggagggaaataaatgagaacacaaattattcagggctgggaagtggaaacaatgaaagaaagcaaggctactcagaaccggctggcagatggcgctcggcttttacgattgacagcctggctttcaaaaattcacccttgcgccggcgcctaaggcagaacccgcatccccctccctaaatcctccttcccaaggacacggcccctgcccctaaggctgaggaatgtttttaaaaggtttcagttgagcaattgacatctaaggacaaatcccggcaacttttaacgagtggatctgaagatcttagccaaggcaggaaagcacacgatcaggtaacctccagattcaccgccctggtgccccggttctcctgggaactggtcctgagatcttggacaaatccctggttctagtttttctcaattgaaaaaacaggagggatgtctttctcactttaaaacttatttaattatcttataaagtttcaatagatgaggtatgccaaccccctatccaacacaaatttttttaaatgtctgttccaaaatggcagattgtataggaaatcaaatggtagggccctctgttgtcctttggtaaataattaatagtttctgggtcccaatcaccgggagaatctttgtgggagcagagtttggtggtaaactctttcacacctcaatcaagggctagaaaagaggttcataggtgagcagagctccagtttccaccagggaaatctaaggggcctacctggagaagttagcatttaagacaatatggagagatgaagtagaatttgaggtgcatggtcaatgattgtttacagagaagggacttgctagggatacatcattgcttttccattcatgcaagtatcattgtgtttttcaggatctctgagacctcagggctagttttaagttcttcccctcctcaacccctctccacttctcagtgcttcacggcacactggggcattctcactagcgaaggtgtcctctctaaggatgggacccctactgtccatctcaggctcagcactgccttggggcaggccacttctggcttctttaggcctcgtttccacgggaggggaagctgggtccgatggtgtctgggtcaaattccttggttccaagaacaggtaccgttgccattcccttccatttctgccccctgcaccaccccacccagcagctggaaaatgatgaggtcatctatttgagaagggccacacaggcctcccacacaaggacctacaaagtcctccaatgggaatttatttctttctgatcaaatttaccctccataccccattcatatacacattctttctcccctctctcttaagattgtaaagttaaagaaactgaatacacagggttgatttaaggtaaacgtccctcccacccatctatttaaaaaattttcttttacttgataactttcctacaacatgattctcttatgcccatattcctctgaggattctttaaagcttttcttgcactttctcctcctcacagtccctgacttctagccctgagtggtggctgagggcaggtgaccctgtagaccgtggggaacagaggaggccagggcaggtggctgcctctttccaacctttcctgggccatgggagctcctccccaccagaggtcagcagagagctcagaatggctgggtctgctctcagaaattgggatcttggaattctctagatgaaatgtaggatgcccaaatggaaaaaaagccccatgtttccagggtgttttggttggggctctcatcctgtcttgggtcccggggaccttacttttaacaccaatacagccattctgtgcttttctcaggggaggggtggttgggggtttggtctgtttatttggtggctttcttggtcagtcttctccctgcgccagacgcacaaatccctcccttagagggaaccacaccctcttagaactctcccttctggggcccaactgcccactttcgcttcccacatgacatggaacccacatcccacacttggccgggcgccttttcttctagttgtatttattgttaaaatgacatcataatattacaggaaatccccccagcctaccctcaccctgctgtgattttactgatcattatctccccctgttctttactcaggtgtatgcatagttttgagagggcatgaatcatggtgtgcagtttcatattaatccccctgctccacaaacacacactacaggacagtttccttagagctcttccatgttcgccatcgtccttccacagttctttcacttgttcagtcctttcgctagcggggaagagcagggaaagaattgaggttccctccctttgtttttccttctctgatcttttgaaatcccggggtccttgtgaacgactcagaaattaaaaccaattccctttggccagttgtttattgttgaaagagagagacaaagagaaattaaggtgcaaacggaaggaaagaagtaaatagagattaaatttaaaaatttgaaagggagcagtggttcacgcctgtaatcccagcactttgggaggccgaggtgggcagatcacctgaggtcaggagttcaagaccagcctgactaacatggagaaacatcatctctactaaaaatacaaaattagctgggcatggtggcgcatgcctgtaattctagctactcgggaggctgagacaggagaatcgcttgaacccgggaggcagggtttgcagtgagccgagattgtgccattgcactccatcctgggcaacaagaatgatactccgtcgaaaaaaaaaaaaaaaacaaacaacaaaaaaaaaaccaaaaaaattaaaagggagagagaggaggaaaaaagagggaaaggaaagagagaaggaaggaagaaggaagggagggaggagggagggggagaaaagaaaagaaaggaaaagaaaaaagagaagaaaagaaaaaagaaaagagtgcctttgccaagtttagctctaagcaccaaatggggtccttgccctctaggaacttctagtccagaacagaggagaggatcaggttgcaagtgattatccttctaccaggcagggggtggagcgctgccaaggagggtgtggctggcacagctgaggggccaggctggctagaccggacaggagtacggggaggagaggcaggttcacaatccaggctggggcatcctctcctccccatctcactgccccatgaggtcccttgttcgttcaagtgccaaccagaagagctgggacagaggcctctcttgtgtgccaagacgggggccaccaccaccctctgagctctgaccactgccctctcacctcttattgctttcccaagtgtttacctcctgattctaaaacgatggtccaatttttgttttattttaaagttaggaacacactgcatgtagcacacttcatggagcacaagtgttttcacatgccttatcccactaagtggttttgttttgttttagaaagtctggcacacagagaaccttctagttctttaaaaaaaaaaatcataaatttttaaatttgataattatccagaacaaaacaaagcaaaccctaaggttaaaagtgagcatcctataagttaagtatagatctttgatgttggggaaacctttgaattttacaaatcgatgtccttgagaattgggttccagccagacccactgtaggcattgttttctttttttctttttccttccttcctcccttccttcctttcttcctcccattccccctccccactttgaaaaacaagttttattctcttgggttatgttcattagagagggaagacaattctgttcagcaaggaaaggtgaggggaagagaaaaggggggaattcagccagaggagaacagggacaaggttgattgctctgtgctggggtgagggtggggggcagagagagaacatcacagccagatgcaaatcacaagagcagaccttcagcttcctggcattggtggggaaaatattccgtcagctgcctttctatgtcctgggcttcattcatcagctcaagagaaaaaaaataaaatcaaaatttcatcctaatttgttgtggttggaccccattctcccacattttggccttcttgtaaagcacaaccacaaaggcagaagtggcttcctgggctgacctgcctctcagttcattctcaaggcgttagcctcatcccatcaggaggagttcagactctccccaagcaccaagagttagaaatgtgttgctaattgatttgagctaaatttgtgttgctttgagacttagcaaaatggctgattaggggccagtgttggggaaaataattgctgatctaatagctatgaaaaggaactcattcacaaatatgtttataaaatgggccttctgtgacattttggaattgtcagggagttaggggtcacggtggttcttcaggaagaaagaaatgttgttgggaaatgtttagtggaaatttagcataaaatgacatgcctaatttaagaaaacagttaaatccatcatggttccaagtgaaaacagttgtcacaaattaatttttcaaatgtttgactattggcaggtctgaggtttactcatctgtaggttatgtccaacttggcaaaagcatggaatcctgcccagtccttggtacacagggactagcacatgtacccattttttctcactgataagttatttcctaattttttggttaacttgaaggtcgaaatagccttactcctttttgtctgtctagtagcatctctaagcttgcagtagctgctcacgtgtctgccacgccccttagaaggacgaatccttgcctggtcggtgagtttgcctcaattcgggcattttcatttgttcattcattcgatatacatgtattgagtgccaaatatgtgcccttccccgtggggaagacaaaagtatgagacactgctactcccttgatggaatcaaaacaaacccaggaagttaacaagagtgggcagtctctgctaagcgattacacagggaataaataaggaaagatggaaagattgtcaaccaaaagacttcaacaacctgctaagagtcttccagcccagttgagcacaccaaatcagaggttacctaaaagtgtcatgagtgctgataattaaactgcagaaaacctagaaggatctgctggggtcaaaacaagcaacatttgacaggcacagccattcagattttcatgccactctgaggctgaaaatttctgcacaaacagcagtgactgaacctttgctagtcacaggatagacctccctgttgatagggtagacctccctgttgataacttgtcagtcatgggactgaatgaggcctttctccaggaggcacagcccagagggttactggccatgctgaggaggcagtcttgcttccaggaggggctgcagaggcctggcccaagagtggtgctgagaactgccttttgccaacttctttctttcattgtgcactctctggagccaaactatgccttccaggatctttcaagactaaaattctcttaggaagatgggcccaatatttcccacctaaccttagaaatcttctatgtctaggattagtgttttgagagttagatgggaaagtgtagtttgcagccagatccttatgtactacagagtgctttcaccttagtgctttcatcctccatcttagctccaaccctccatcttagctcttgggctggcccccgtcttagctctagccttacatcttagctcctggcctgccctccatcttagcttctggcctgccttctatcttagctcctggcctgccctccatcttagctcctggcctgccttctatctttgctcctggcctgccctctatctttgctgctggcctgccttccatcttagttcctggcctgccctctatcttagttccagtcctccatcttagatcctgagctttgggtctcttttgttttgttccctaatgcagatagagatagtctatattcaaatactataattaatttccagccattgtggaatgaaaaacacattttaatttccagaatttaatttccaactttcctttcacaaatacttttaaattatctatttattacccttgaaataatatgtcttatggataggtctctgtaactatcacagcatatgatagtgacctttatgtttttttgaaaatatctgtgtaatacagattgctagctattttttatgttaaaaataagacaagggaaggttgtctggatgactgaactgaaagaactctcaggtgaactttgctccatagtgaatatgattgagatttatagaattattaagttgtggcttcttaaaaattgccaccgaaacaagaatgcctgaattttgtgttctgggtgatcgtggatgagcacatggcacatctgaaaagtgatttggccccaggcctccttacctccctgcaggtggctgtgttctcttcagttaatcccattagctggcaaaggctgatgaggctactcgtaagggacatgtgcattttcataaagagctttagaggcccaaaagcccagagagtcacatttttaatagtggggttcctaagagtagcattctaacaagaggcattggggggaacaggggagagcatttgggcagtcaccccctccccacttctagttccagccccataccctgttttcccaacccaagtctatggctgcctagcagccctctaagcaatgagttgactttcttccactgtgaccccaggacacgtggacccctcacaccagatctccaagtagcagcatagtgcttagtgttattctgcctggcagcggggtgccccccccaccccattcagtggcagtcaggttcagatcgtagccttcagggtgcctgactcattccggctccggtcgataatgacaagccccatgtttttctccagcgtccacggctatgacacatacaacagtcaggaaataaaagaggcttgagtactatacggttgctttactttctttaaaaaagaaatataatgtgaagggcatgggggaaggagcaaggaggcaggagtccaggccagcaaataagccagcagcaaaacaaccttgttgtttgtatgttacataaacagcccccccaactgtcctgcggttatatccttaggaaaaactggggcttagtggcgcttgggttgatttcacaccttagcttagagttactcagaggtgtattaacagctaatgattccattgagggcggcccagattgccatcttgacttgccagatattagcaatactcttatagaaacccaaaagcctgccaattaagttccccagtgtaagttaaaaggggcctttctgagatgcgtgatctttaggaaaaggaaattaaactaattttgaaagctcctaacactcgagtttccttataatgtaagtaggtgacagctgggatgaatattatgagtccctcccataatgtgtatttgaatagatgtcatggattctaatggcagagttcaaagtcactcagaggggcgggtttttatttttttaatgtcacccacctgaaattattttcagaaagttctgtaatggctaacaggattagaatgacattgtcacaaaatgatatgaggtgttaaaaagacccctacatgatgcggtgtccacaacgcacaagaagtacccccccacccaagcatgactcagtaacactcagtgaggaggagagcatcgaattatataagttacagttttatttcagacacacaagcacgtaggccagcagtgatagtaaacatgcaggcatgctttccctctgagcatgagaggcgtttggattttaccctcccagatgcagaacctctgtacttctaaacagcttcctcctgacccttagctaagtcaacggggaaaatcagcctccaagttttgctaaattgtgtaccatgacagtgacttgtatttaggagaccttgcgtggatctaaagcccagaagtagccaccaccaccgttcctcctgatgaaaatggcctcaccagcacctcgctgcaaacagacaccagctcaaaacattgattttctccccaccctcgcagggttaggattctgcttagaactctgctttaagctaaaatttccatcaccaaagggcctgatttcaggcagagaaaggaccactttagcaaatgagagaagcgaagaggagtggaggaggagggtcatttcaacagcagcaaaactcagccatgccattttccctgacagcactttaattatgatgaaagaacaagattttttttttccggtttttacagaggaggctcgtggtggggggaaaggagggggctctgaaagagatgtgagctgccaaggtacagagtgcaaagcggctgtcactgccaaatgacagatgcagttggagagggggagagaagcccttccctgagcctgtgcaccagtggcctattctgtgggggcccaggactagtcagccaggggcaaatggtgaataggatggcccaaaggagccacctgctacatgctagcttccccctttccttccgtgagattttaaccccagggctggttctcctagttgtgctctgctccaccagctttgaaagccttggaggggtttcaagtggtcacataccttattgttgaaaaggatgtttttctttaaagtcaggtgctaagtcaggtgtgaggttgaaatggacacttaagggcttcagagcaggataaagggacagagcccaggaagcccaggactgatgctctgatgggcagaagccagccgtgttttaggaatggggaaagagttggagcaccagatgttaagaggctacagtcagctcaagcaagaacgagagaacggcgctgtcactgacttcccacctcccggccttgccggtaatccctgctctgattggaggcatggggtccacaggaggcacctattgtgttgccacaatgcccaaaagtggcctgagaattctgggctgctagtgtttagaaagagatataagtgaaccctagactctcacagctggaaaaagcctttcttcctgggaatgggaagtaacaaaatgagtccaggttagctgtggagtccttagagatgaagggagcagagagggcggaaaaaaaacaaaaacaaagaaggtgcattattttgtgtttcctttcacctccctccttggttttagggccctttcctggcatgcaacaggaagtgcaggctgtgttgagagcctctggtgcagacttacgcagagcacaagagatgatgtgagcctgcttgtctgggctgcttttgtgtaactgaattacacagtatctatgttagaagtgatgtcacccaagagagccccatggccttgaactaaacaccaaggggcatcgggccccggccccaggaggcctgctatgcagcaacttttctgaacaatttgtgattttctgttcttattcccctcactaaattgtcatgctgctagagacacttctaatttgatggttattaatgggcagctggtaatgaaacagcaaggacttagggctttgcagtaggtgaattacggacatttacaagtaaaacaactttacttcttacatttagcaagaggtttaacaagcaaagtgcaacatctgcagaatcttatgggaggaggcagtggtcttgaaattgtgaggcagtactgcagggatagagatcgcctttccctagaacaactgcaatctccccatcagagccaactggaaatacaaatttgctcctatctccatgcgtggtgattctgcctgctacagagatggaggaacagtgatctggctgattttaatgggcccatttagggaaaaacacttaaaaaatatgtgaaaatgcattttccccctattccttctggaaagcaacattagggtccggcagttctgtctggaaggagggagatgcaggagcagcatcctggcttatgaccgcgtggctgcttagtggttttattttagaaagagttttaatgcagaggcagcggtggtggtgggggtgcgggtgggggggggagggagacaaatcagatgtagaggtttgcagagcctggaggccaaaggaagcccacttcaggagaccacattttcagcatcagaataagtaaagtatttgaggatttttgtctcctcttaaaaataggcactttggaaaaggaaaatatgcaggcttttgagaaacacagtgaggtgatcagttaatgtgaggtggtggtgattgtaacgtcggaagaattggtctcatttttcatgtcacaattaatattgtttgagattagatagcttcttaatttagaccatttacattttacagagcactaaaaagcaagcctccaagccactttctggcagcacaaagccaaataaatgggaacaatataaccttaaaaagatccattctttcacttgtagctttgctctggtcaatatcgagtcatttagcacaatctaaaaaactcacatttttcactgctagaaatatgtaattcttcctactattcattgcctgcagatgtcctgttctggggacctttttgacttgggtttttgtcttcttgacaccaaagcatacaatcaatttggtcaaaagttcaatcgtgaaaaagcatctggatgttttgtctataaacaaccagtttgcctgaatatttgagaggatcagctcagccaaccacctgtcctgatgttaccccaacacagcccaaatgcactcagaggggtgcggaaggaagggtacacacaaacaaggtgtgggggtctcgctttctctgctgcagccatctgaaatcggctgcagaggaggggggaaatgaagcagcaggctagtccttctaggcagacgtggagagagaaccgtgtggaaagatatctttatggctagactctcagcaacatcactgtcagaatctggtgcctgcagccatcttagaatttagaggaagctgaaggcacctgcccacattttgtcttaggttacaaccagctcaatccagccagcaaaaaataaggttgagaagcatttcgcttttacagaaaaagaaaaaatttccatgattctgttccttgaaaaaaaagctgaccctccccaacccaaaccttttatttcaaagtcaccaaaactgagactagataatctctctctctctctttttcctcgtgtgcatagccagtttagactctcttggctggaatttttcctgatctctcagtgcagtaaaaagccaggcagatgggggaagaagggaacatggagaggcagaagaaggggcaatggctccttggcacatctccctttgtagttcagtcttacacagtccatttttatttgcaaatagctcagcccaaaagagggtattgatatgacccccagatgctgttccgaatccatcttacttattttccctcgggggtgcaggcagggcagagcccagatatgatcagaccttcaaagcgcagccttgatcctttatttttcatgttacagtcacagaccttgaaaatgtgttttcagcagtttaccacataccgagaatttcaggaaacaaaaggtcaagaattgatgacttagatttattagtggccccattaagcagacctcagaattctaatgatgggtctttgctagacaaatcaatgtcatgtttctaaaaggacaagcgtgacagctgggtgatttcacagaattatcaggtattgggaggaaggttaagcaggggttcaattactatcaattacaatgatgttcttgtttgtttccctggggttttcatgctgctagttgtgtattttttcccttgcatttgcatatttgctgttttgctttacatgttttagaaattatccatctatttttttttttcctctcaaaatctcttctacctttggcatcaattgtagaaactaaatgtctgctgtagagttctatcctttagtcatagttttttgttctgttttgttttgtttttaaacaaagttctcttctctgcctccccacccaataaactgagtggatgtatagttatgccaagttgtggaaaacacatttaacacatttaagaacgtgccaggtatgaaatataaagtatgttatacctaagattaaaatattaattcgatttggggattatgccagtcaacattttggttttacatgcattcattcaactaacttatggtatcttgttgaaatgatgcatttaaaataattactgatttaattaaaagaaaactaaggaacttttcaggctgagaatgacattaaattatcctgttcttgagcgcctcccagaggcgtgggttaaataacaccagaatatgaattgagggtcatttcggcttttctagactttgggatgcctccaatggttatgagtaaaaggagtggtgctttaacttagagattagatgtctctgggtcccaattaagttttatatccatttcctttgtatggttgagctatttggcaccatcttggcagaagacagggatccagggcctttgctaccagtggaagggattgaggaaagcttcctctgtgataagtcttggcttggcaaaacatagcctagccttcttccttccctctccagaccagggcaccacgtggagatagcgccgtttgcttgggctggccttggacatttcagagttcccctcttactacatgctgacatcatcccgcaactccccatgtgccttccctcactgttgccaagtgctcttgaaagtcaaccaccttcctgggtgactgctgctttctcacctcaggttaaacccatggacccagtgaaagttctcccaggggctcccatacccgggggtaatcataccttccatatgtgaagggctagttttccagagtttttatttcttggtgttaggtcactgcaaccctgggataaaaatagatgtaattagcatgttgcagatcagactctgcacttgtagctttgtgccactttctctaataataccaattttggtgacacatttcctagaatcctggacttgcttcaatccctaaaatcctccaagagctgaattgtaggacaaacctgtttgctttagaacctagaagggctttgtcccagttagattgtctcttttccctacctttctagacattgcaggtccatctccattttcttttttgtttgtttgtgtttgttttgttttgttttgagacggagtctgggtttgtcgcccaggctggagtgcagtggcgcgatctcggctcactgcaagctccgcctcccgggttcacgccattctcccgcctcagcctcccgagtagctgggactacaggcgcccgccactgcgcccggctaatttttttgtatttttagtagagacggggtttcaccatggtctcgatctcctgacctcgtgatccgcctgcctcggcctcccaaagtgctggcgtgagccaccgcgcccggcctcatttttttgtttttattatcagggagcaacggctccattctcccctaaggctgacatttttgttgaaggctgagcacgcatgtcttccgtgcttgtggcaaaaggccctttcctggctggctccagaatcctcaccagttaattgggaaaaaatttgagttaggcatcacaatttcagccgagctgggcaaacaacgagtacacctgtcactcgagccagtgtccaaaactcagccccatggatcacagctgtagcgttatttcagcatgagcaattcagtatttaatgttccttagaaaaaaagtaaatcattccaagctgctactgttcacctattaactctttcaggatttcatggtggtggggtggaggtggggagtaatctataatttgcttggctagcagagataatacccccttcccaagtctgtctttcttacataatggccatttcttacataatggagaagaggggctgcaaaacaatatcctcttgatctgtggcagccactgccttccagaatgagaagttagattttcttctttcgtttcatttatatttttacctgcgcagtacaggtactgcttcctacgatcagcagcttccatttcttccctctttccacggtagcttaaattagcccatcatcatcagcaaatcttaatttacaattaagtgctgggaaaaaaaaaagttcgtcattaatcagaccttctcattttatgtaaatggcccccaaaagcaacacacatttttaatctgtcctgccgatagctgagcccttctgtcatttgggtcctaataaatgaattggccatctgcaattaatctgcatagtacaaatcattggaaggccgagtctgtctgccttctgaaagaaactggctatatttagttttttaagcaagtctgctttgtgttctttgtaaagtcagcgacattctttcaattttttcggtgtaattagcacaaaaggagccgtaatctgagaaggtagtagagactaaggcaaccgaaaaacaggaatgttcaagaaagcaggcagaggcagccttcccagtattgggcggcgtgacagagaccctgggacgtggctgtgggtagagctgaggtctgtagctcataaaaaatctccttttcatctgatccccagactggttgcaaacgcttgccgcttgggctgaataattttccccttctcataacttccagtggtcagcaaggaccttagaaagacacagtgccatctgggctctgctgttgagtgggctcctgacaggccagtgagagttctgtgcacactgccaagccctcaataaactgctgagtgggagagcagagggcatagccctgagctccccagcaaatgctgaatttcaaccaactggaggctacatggaaatcaagcagaggaaggctgcagtggccttgggaaggagagttagagcctgtacgaaaagagggggcagccctcctcattgggagctgtgcagactgtgccccgatggttagttcccccctcaaaataaaagccagggaaataggtggagctaagcggtaattacacatttttcaatttcaactaaaacgtgtgggcaaacacaaaacgatgaaaaggtatctacatttctagatgaattaaatgtgtgactaattatgtcacgttaattgcttaattcctggtttaccaacagcagatggaagtgggactggagagggggttttagctctgaaggcgaatgacacctgaggcccagtctaaatctcagttttcccaaactgaggctagaccataacggcagggctgtttgaaaatgatcacctacatttggttggcaggtagataaaatctgaagatgtaaaacttctatttagcagtcgtttcatttgtatatgtccacaaagcagcatttaactaaacaaaatgaattgcctgattaatccagtgtttttaactgtctaaactccaattctatggagctaaatttgaagaagtgaataccatgaaaaaaaccctaaaatctttaaaataagaacaattataaagggcttcttttatctaaggaaattttattagaacctcaggcctcctgactgggctcaatatcacatctccaggtgcaccaactgcctcttattttttcctgttgtcacttgtttagtaagatgttggatcaaagtgtcatttaaataaggcatcttgtaaataagcaggaaagtaaactggtccatgtctatttttaactagtctccctacattattctccatcctggatgagtttccatcttcaaggccaagttaaaagttctaagcaacaggttttcccattaccttagtcctcatgaaaatttttccccaagggaagtgaaggatatttcagtttaggaaaattagctttcctgccgtagagcggcaaaactcttaaatatttttttctactcaattaagagctccattaagtgggtccattgatctgttattgatgttgatgtacctcaaagaaaatggagcttcctcagtcttctcctggatttgactttcagttttggagttacttgtggaagctgccgcctgtgttctgctgatgggtctgccttttggtcctgctagtgggtttgttttctgctccctgttgatatccaagttgtgtgtccacctagaatcttcaatgaagggtaacatgtgcatcatatcatttaggcttctaaaaggaacaaagtaatacatgtcatctctttttgttagcttcccccttcttgaggtagatggtggttttgttaaaagtccattcctgcccacgctggggctcatggggatgtggtgagaaaggcactgatggcctggggaattgggcgtctgtccacagagaccaggaagcctctctcacagatggtgcctccccatcagagagtcaggaaagatcaagaagggctgcaaaacgtcctctttgccctcatattatgtgccatgcttttaagtagatgtttgaacagcatctcaaagccactggctcaagaaattgggtccaaatacactggccaatgtacgtccacattctgtttgaattagagtatgttctgaattaaaaacagatcattttaaaatgagttgatggataataaataggaaaatgtcatatggccatgtagttaattcttcagtaattgacttcaagtcttctgaaatgaagttttatatcatgtttagttttgaatacaagtttagggttactttatggttggagttactaactagtgaatatgacaagaaaaaaaaatgtcctagataatcactacattcgatttctaagaacttttatggtctaaagtaatagagccttcttacaaggattaactgagactaggaaatgctttttacaattcctgctttcatcatctgcatgacataggctttgatattcatttgcaatagcagtttcagtcattctagctaattaaagtgcagaacgtgctttgaagacaggaaacactgtggaagtgctaaatactattattaaaaccttacagctaaagtttctgtttcagtggaaacctatttattgtttcctaggctattaaaataatattataattacatttgctctgggctcttggaagacaacttaaaatgaccccaactaatgaaaggccaaggataacattcttgtccaaaaactgagtgacagcattaagcagaacagtattttcaagattctaagctgtagcaagtccactgcttcaaaaggtagacaaggcattcttactcagaaaggaggatacccaggggccaaggaacacaaactgcctttatcaccacgaagctgacaagaccacagaattcaaaccctgatgtgggacgttgttcattgttgtcaaatatggaatgttggaaagaaatgtttcgaggccatatctccatgtagtgtgtgacaccatctgtttaaacaagttttttcgttaggtgacctagtgttttaggttagggatgtgttatgatctcaactggctggcttgggcatgaagcaagtctcctgagccagagatctgtgctttccttgggcattttatacccaagatattctgccctttgtccctccctgaaatctccataactcccttctcttcctgagccagacgaggggccccttccattggaaagctctctcatctggactgttccaagagttatgccaatagattgccccactttcaaagcataaactaggtacttaaaacagtaatgatcaattaaattactaactcatatgaaaaggtcacacatggtagcctccaaaactaaaagacttgaaaaaaaaaaatcacaacttttagggcctcaagaggtcaaatttgaggccaaaagctcagtaaaatctcttctttcactttgtgtggagtgaaaacagacagcctagctgaccacaaaccagcttgtgtttcagcactctgggtgtcatttgcttacctgtaaacccatgattccacctgctgtcatttatttacaaagtgaatgctttatttatccatcagtagttagtcataataaaatataggtgaaacctacacttaaaaaatttttgttttgaagagtggcctcatagattgagagctgaaaggagtaaagcctgatcttgcgttacccatttctaggacaatagtcccaattgtgccttgcctaggacgcatgttagtatatgacatggggcagtttcactccttttaaagttcaggtgtgatgtttatctaaaaggggaaggtggtaatggagctcagagatttccaaataaggaggctcttcattatattcattgtataactttgtagctcctggcataagtatctaggttgtatttgttactatttaccttgtacctcttaaagacaatgtatctgtgctttgccacagtagaagcaggaaggaagatgcttttgaacaaatggagcataacaaaaatgtctggcctattcttccctcttacaagtctttaacaatttttaaaaatgacaatcaatcaaattcagccaggaatttttaatttaccatctaaagatatagaacctgtgctgtgtcatcaagcggttctaatttaggtggtggatggtagtgagcctcactatcactagtacaggcagcctaggaatcatcgattctgaggccttactgctgagttctcctatgagcacattcaggtgtatctgcacaatatttttatgcatctttggttaggtgaaaagcatcaacctaggatagttcctttgagcattttcaaaataaggtgtatttttgtgtggaagagaggccatccatgatcaggagtgtgacaaaaacctggccccaacttttcagccaagttcaagaaagtcaggggtctgcagcagcccagggcaggacggtgtctaggctgcgcttcctgttcttaattccaagtgttgtttggtgactttgaatcgccctctgttgtcttttcagattcataaaaaagaggccttgtacaatgggggcagcagtgtacctgaaggggccaagaaaaataatatgtggcatcttcatctgtcacaccttttcttactcgaagtggagcaaactggggaaaaggggggaatttcagtcatccggttgaatggctaacagtgtctttttattttcaaagctaacttaaaatgatacaagtttgctcaaggcctctggtggtatcagccgccccatacccctggggactgttaaatgtgtttccatttataggtagacttttcttttttctccttctccatcaaacatcttaagtttcatgggctctgttaagaagtcaaagaaaaagttggaagacagtttgtggactttgcatatctgggctttccgggacgtaggcctgtgtcccatccaagacactgctcacgtcttagcctgattacctggccgcctcggctcacctgggcacatggtgagccgcggaactggcaggcaccaaacatttattgaatgaataaaccgtatcccagcagacaccatggtggcagcagatgacctaaccaaggtcccaggaaaggcgggctggggtcaactgcttgaaaatttagtaaccctgctcctaatcccgtgcactgctatatcctagtgtgcggcgggacacttgagagttttgaaagaaccctcaaacaagttcacgttccgtaaactacttttccctctgttccagagcccccagggcgcccaggcaaggccgccacctctcccacctgggaggacgcctcgagcaccgactccacagccacggccaccgctcctcggctcccgtgacaccggcgcgcctgctgcttcgagcaggggaggctttgcactcccatcgcacttttctcgtccgaagatacgaaactccgtccgggcgtcgcaaataattcgaattcggctctctgacacctacctcggcgggcgcgcgccgctgggagggcggggtgggtggctggaggtaaggaggcgcacagcaggggtaagcgccgccgtcgcacactttgcacgccgcccagggctacaccactcaccgaaaattgggaggcaggtctgggaggcggggttgagcgcccaccgccttgggcgcgcccgcgccccccgccatcgcggcccccgcgcccccggcccacgcccgcgcggtcccggcaccggcctgcacccccagggtgcgcggcggcccatttgggtgcgtccccggtgggccgatttttcgcgcttccccttcggtttataggggccgctgctatgggtcggtcctctgaagaggctggggcgtcatcggggccggttagaagctctgctccccggcggggacactcagtcgcgtcggcaccgcggagcgggctgcgtcaggtggctggccggcgcggcgctcccctgctctctggctccgggctgcggcgcggcggctggagcgagcccctgtcccggcgcggggcggcggcgggcggccggcaggcgctgccttgcgtgtgagtgcacctcactcacatgtaagtcggggagcgccggggcctcccgcggaagtgcgagtcgcccggcgcaggcaagagccgccgggtccgggacaaggcaggggcgcccgggcgccgctgccttgccccggggcgcctccgggcaccccccaattctctctcttttctcttctccattggcgtgcccaagagccaaaccaaggagcgcctgagggtaaacagactcctgccatccgcgcctttgcacttttctttttgagttgacatttcttggtgctttttggtttctcgctgttgttgggtgctttttggtttgttcttgtccctttttcgtttgctcatcctttttggcgctaactcttaggcagccagcccagcagcccgaagcccgggcagccgcgctccgcggccccggggcagcgcggcgggaaccgcagccaagccccccgacacggggcgcacgggggccgggcagcccgaggccgggggcaagcagggagcccgggccaggcgcgagccgagctccccgaggtggccgggccaccatgctgaagatggccatgaagctcaaagcccgggcggcggagagcgagaagaagacggccgcggcggctgccgaggtggctgccgaagctgcggcggcggctgcggcgttggccgagccgagagagccgctcgcgccgcggaagagcggggaccccgagaagctcgcgaagaaccccaagaacccggcgcgggaggcgctccccgaaaagttcctaacagacaaggagcgcaagaagctcgagaagaagctgctggagcagaggcgaaaggaggagaagaagaaggagaaggagaggaagaagatggagaagatgctgaagaagaagaagaagaaggtgccagaagcccaggaggaggcccgatgccccgaggccgccgccgccgcggccgccgccgacgacgacgagggcgccgaggagggcgccgtcgggggcgccgaggagggcgccgccgccgggggcacgagtagggcctgggctgactgggacacggactcgagcgacgaggacgacgcctactacgcggcgccgcgcgttgggggcatcgtgtggcggcccgggccgctcaaggctggcgcgctgagcgcccacctgcccctcgtggtgttcctggtcttctcggtgcgcagcccctcgtgggtgctcaacttcctgctgcagaagcgcacggagcagggccgcggctgcggcttcgtgttcggggcgacctgctgcttccgagtgttcctgggctgcgccttcttctcctacttgggcggccgcgccaagcgcagaggccgcgggcgctccggggccagaggcgccttcggctcgggccatggcgcccggcgccgggggcgcgaggagcggctcatctagtcagaccccccaccccgccaccgccaccagacaccaccatcgctgtgtagtgtgggtttttattcgtgttcgtgtgtgtgtgtggacacattttccttttcggttgctctgtcctttggttcgtgctcgcctcgctttttccacactcctgctctctggctctctgtgtctctcgctctttcgaaaattttcctaagtccgggcgcgcgctccctccccttccgcccaccccagcccctcggcggcgcccgcgggagggggaggaggcctcgggggcgccgggcgacgcggtccggggggtggagcgttggcgtcgtgcgaggggtcgtcactggcgcggagacgccccctctcccccctcggctcagccgggctgctgcccgagcccggggggtggggggcgtctccccggcccgtcccgtccccggccgggcgcgggcggagggaccccctccccgggctcccggggggccgcctccctccgccggctcccgccctcccagccgccgccgccgccgcggccgctcctcggccctcctcctcctcctcctccttccacccccctcgccgccgccgcctcctcctccccccgcctccccccgcccgccgcggcgcttttggctcggggcggcggcgggggcccggccgaggcaataagagcggcggcggcggcagcggcggcagcagctcccgcagctcctgctctggtccgcctcggcccggcggcggccatcagccccctcggcctcggctcgaggggcggggagctgcgcgcgcccctcggtccgaccgacaccctccccttcccgcccgtccgcgcgccccgcggcccgcggcccgcagtccgccccgcgcgctccttgccgaggagccgagcccgcgcccggcccgcccgcccggcgctgccccggccctcccggcccgcgtgaggccgcccgcgcccgccgccgccgcagcccggccgcgccccgccgccgccgccgccgccatgggctgcctcgggaacagtaagaccgaggaccagcgcaacgaggagaaggcgcagcgtgaggccaacaaaaagatcgagaagcagctgcagaaggacaagcaggtctaccgggccacgcaccgcctgctgctgctgggtaagggcgggcggggggcgccggccccggcccgggggccctcgaagggcgccccgcaggccgcgcgcgccgagcccgccccccgccccgggcgcgcgctcccgagccccccgcccgttcgcgggctctgtctgtggggggcgaggccggaagggggacccaggggcgcggattcggccgggcgggggctcaaaaacggggcggggggccgtggcgacgcgggcgcgggtccccctcccccggcctgcccgctcagtgtctctctcttgctctcgctctcgctctccccctctttctctctttctctctttttccgcgaggcctacacgacgccaggggtttgggtgcgtgttggggagggggagggggagcccatggggctccggagactgcgacaaaaagagggtttcggggacaggaaaccgggtggcgggtagagggagggggacccgcctccgtggggtgtgagatttgttgggagagggaaagaggggaagaaaggggcgaggagaggagggggtgacgctggggggcgccgtggtggcggagggggcctcgccaaagggaggctttggcggggagaagtggccgaggagagtgggggggctggtgacatcagcccctcggaaaggatcggagcggtaaaggtggtgcagtgggggggagggggcgcaagggagtcgtggcgccggagtcgggaggggggcggcgaggggaggagggagggcggttgccgctgggcgcgacttggtgcgtttcgggcaggaccgactgactgtgtgtgcgcggagcagacgtgtcccgggccaggccgggccgtggaaggaggagaaggagagtcaaataaaataagaccaccccccaacaccaaaaaatggatagagttagtacgagaagtgcccagtgaagccaaatgacacgtcattttacagtgtgacctttttttccccttccagacttgcaggctttttcaaaagcagagcggagaattaattgtagcagctgccccccccacccaccacgagcagcgcccccccaacactattttaataaaccattaaaaaaaacacattttcctgctggctggccacattgagagtgctttgtgaaaagaaaaaacaaagacattcacaaatcagataaaactggagaatgacatttgtctgtaaatggcttcttggtctggaaatggcgtggtttctttttttttttttttttttttttgtcctcctcaaggtgggaggggggattgagagtgctctaaggagacttttcctccaggtgggaagagataaaaagacattaattagttgtttatcaagtgacatttagttgtttggttttgggttttctttttttgattgcgatttttcctctgattaaaaaaataataataaaataaaaaaaggttaactataaggagatggcctttcctccttttttttcttaaggtgctgttttgggggaaaaaaatgtaatgaaatgaccaaaagaattacacagcattaattaaaaatggaagttttccacttccttgataatttggctatctgaataaatttgtgaatttgctaggttaagacctagttcgtggtcacatttcaacaaaacagcttgagtataaagaaaataataaaaggctgttcttatttattttcctttggtggcttttggtttgctctttttgcataggtcatgactttgttctcctgggtccagatttataaaagcagaaaattactaattaagtcaaaataagtgtctttggtgtttatgcatttgcaatttcagtaattaaatggtacatgtgttgctgtcttgtctaaaacttttaaaggcagaattatgctgttgggatattagtatgcgtataacttgatttcaaagtataaatctggaaaagtctagaatcttttctgtgaatgctatctcagtactactttaagtcaagtgtgatgctaatgatatcttaaaatttccaacaccttttgtgcagtgatcacaaagtctccacttaatttgagactgttactcagaacacgccttgcgtcacgggggctaatctaagtgtcctagtctatatgactacattacatcatgatgtattgattgcctctggcctaggaatctgcagcttaagccagtgacacaatattttgcatttttaaatggtgattctcaccaaataatgcctccccacaaaagaggaaacctaataatgccccaaatcctctttttactccatcttaatgacataaaaattaagtgaattagagaactacaatgatcttaaaataatttttcagccacatttcataaatgtggaaactgaggcacggatctgtttttgcctatgaaagataggtcctgtaactgttacacagtttaacacttctgaaattagaatattagagatcctgctaaatattacgtattgtttccttggcctctcttaatagtgccatttatatttttaatttaccagagttaggctcattaagatagtgtttgctttgaaatcaatgtttctgtggaaactaattttaacttttacagatattgattacgggcttgtgaaaaggcaagtaaaggaggaatgctgtgctatctgggcattaaaacaaaacaatacaattaaaagttaaaaagaaagaaaaaggtaataacagatttgtgtggaaggagggcaaaaaaacttcacacgtggattatctgttggagaatgtgcattgcaaaaaagatgcaaaatagcaatcctccctctagcttgatggaaatgtgttttttccatgaaacatatatgtatttttacaaatgaaagatgatttaaaatggaggcatgtgtttctactctttgagttgggaagggcttggaatctttcaaattcagtacttcccagggatagttttccttttgattaaagttttgttcttatgttactttttactgttgtttttgcagtttacctaatgctaatagggtctcaggaactgtatttgatgttaaagtgtggtttttccagaagatgacagataattgatggtctccccttttcctcagcaacatagttgtacccagagggaatttatctttagaaagatatagtttgtgaggaaagaggaggatggataagtggataaaatgtaatgcagttttaggggtggatttttaagtagcccaaggggtaggaaacctgcacagaaagaagctgcgttgtgaaaatgttgaggaggaaagtgctgcatcgctacgtgatgtggaagagactgcagtgtctgggcattgttgggaatcccgggtattttaaccatgaaacatctgacaacaaattatgtgtctagatatgtttatgtgtgaatgttcatgtatcagggattcagtttcacagttttaacttcaattttcttgtttaccccacaaatgacaaaattgcgtcattccttctctttgcccctttccaacaccaccccacaattttttaaacaatcaaaagaaaaattaaaaccagcaaaccttaaattcttgtttgttatttggatggtgaaatactgcaggtagacactgaattggacattgatttccttttctctgcgtcgaaatgtcaaggaaagttgcaagtctgtgattttgtgtttggttttttgcatgttgcttctatggaaaaacaaaacaacaacagcagacctccctgcccaaagtgttaaaatgcctccttcataacctgagacttactttcattttctaggtgctggagaatctggtaaaagcaccattgtgaagcagatgaggatcctgcatgttaatgggtttaatggagagtaagtgtcaaatctgtgcaggggggcaccaagtaagaggaacagactttatactaacctttaggaagtataggtgggctttgggggctgggcagccagttttcacttaatttttcctgatttacatattagaaaatcctgggaagggctctttagggtccctcaccccccacccccttggatctttggtgcaacaaatactactgatgaaagcaccagtgtttgtgacaaacatctccctatcccaagaaaatcgtgcctggttgcaggggacgcttgacagcacttggccccgtgacagcccctctccgggccaggtccctgccacagtcttcggacatcactgcagtgtcttcaacgtggctttggccgccccctcgtccggcccacgctgatcactgcaaattcaccccaccccacctcacgcagatttcaatgtaatgaaccaacacaggatgttttaaactattagggaaacattgtttccataatattctcaccagaaacagatgtggaagtggcagcccgtgtttacagtttctcattttttttgtccccctttaaattaccattatgggtaaatcattgtttccctttaaaacaaaaaacaaatcagtacccctgcctacagaaaagaagagggaacatttatttaaaggatggaaagactgggagttaggcactcccagcctcactgaggggcatttttgcctttgagaagtcctcccaggtatcctggtatagcacaatgtggcaatccgtagtgggaatgaagattaaacaggagagactttgtattagacctgtgagacgagttaggaagccctgcctggcatggggaatgcaaacagggaacattcaataaatcggggaacttgcttttctccccaagaccccagatggggcctacccatcgttctcgtgtaacaaaacgtgtaaaaaaaaaaaaagaaaaagaaaaaacaaaacaaaaaaactaagttgaccagtctgttttcactggtatgagagcattaaccgcactagatttcaagcacctgaaggcactagtttgtaattactagctggttggcacagtcctgttccctttcttaaacttggattcgattgaaaatttaaccttgagttgcttcagcttccatttcaaaaggggagttggagtcaaggtggtagcgtttaattataccaaccaccccccaaaaaaacaaacaaaacaaacaaaaaaacctttactagtcactaagcatccaggaaacaaaggtgaactttttcacctttcagagcaaggcaggcagctccttatagagaattctagaatttgttagatcaaataattgtttagagaaggatgacatcacccatacgaatagtcctgttagttgaggatgctttttctactttaaccctgaattcagaaggattggttgggatgcacagggggcttcttcactcatctgattatgactctcaatgggttatcaacatgcacatacgtgctattgagtaagtcagcatcacttgtcaccaaccaattccgaaattaattcttgacacacccctcgataaagccctgccagcggagactgccatcctgacaataaataaataaccctgagacagacttccaaccatgaatctgtcatttgaagaaaaatcttgcataaattttccccctgcaacttgcaggagtacttacttattcatgagagtagttaagcaaaaataatttgaccatgtatcctctagataaatattttgatgaaaactggacatggctagcatttttcaaagatgcagcagccactgtttaccttagcttgagtcggatggaagctaagtcacctttgaaataaattactgacagcttcattacagattgccctaaaatttaaaaatttttatagaaaggattctcctccctaagcgagccagcctgtaacaccaggcaagggttttaaaccagaacttctcttttctgttttctttttggaaagaggaagcaacattcccagtttgccttctttgcagacaagggcacagatacgttaaatttagcctgtgagagggtttacaggggtattcctcatgggagcctagataccttatttttatctcatccaactgcctccttttttctttttcctcactgcggtattgcaacaaaagctatttccttcttaactaggaattccctatgagacagtgacatctgtccctaaagggtggtctgggtggtacagggttcttcctccctgatcttgcgttttgttagggctcggctgagctattaaatttgccttaactctctgcgggctgccatgctgattacatttttaagagtaagataatactgatttgaccttcagaaatacagaggttggatgcggattttctaactcaaaactaactctgtttcttacatttagtgccaggaacaaaacaaaaacaaaacataaacaccattaacattggttgaactaagctaatcaattaccaaactgtagaatgctgcccttcggccttcaaggaggaattcctactgtttatgaagatcgggtttgggtttttggttttttttttctttttcttttttccgtggtggtggtgggtgggcttttgttctttttgttttttctgtggtggtggtgggtgggcttttgttctttgaaattttttttgctacatcacagtccagacatagtttaatgacaatttatggggaacaattatttataaataaaaccattttataggtagtttccttccactgcaagaagtgaggtcattagttttgcaggaaatcctgggcagaaatctcccccgtttatgcctttatgccttaagttacaaccttgggaagattctgacctgggagaattaggagccttatgcgctgccatattctccaaagaattgtgagataaatcactgctttagctccctaatgcgtgtacgtttagtgaaagcacaagaaaacaattatccatccctcctgtctccgaccagagtctccagagagctctgttaatactgcagcaaaggtgtgggattcttcccccatggcctgcagtctcagtggatgttccaatttagccagaaaggcgacctaagaattgccgggaggatggatggctggcgcgcgaattgttgcttttgctcttggctgatggttgaggaatgtagagagactgtgtggggtttgtgtgacactgcggtgccttgcagattaggtgagctttcaatctctctttaaaaggggcggcgaagaggacccgcaggctgcaaggagcaacagcgatgggtaggcacattcaaaaccagaaaaaattgttaacaaaccaaacaaacatgaagatcatactgggaaactgaggccagagacccgggaagaaaataaaaatcatttaaaggaccatcagccatattggcatacatttgtgaataacacacaatttcctgacattttggagcaagtaaagtgcgtaacataaatttttttggccatgcttaaagtagaatgagatccagctgggggaaagttatagatttcagccttggatgatcagtttaggattttgagaattgatgtttttccatatggtttctgttttcccccagctctccatttgaaccagctgcttgttttaaaactatctactaaattccatctacccactggttggtctgattttaaaatttcagacctctttgaaacaaaatttgtttcctttattaaaatatgcaatgctgcaccgtctttaattttgaaaaacgccttggtaccttgcagcaggtcgttaagaatcatctcgaaaagcctctggccttttaaaaatgatcaaatttatttgaatcaaaggcactttacgttagcttggtggataaggaaattcatgatggcatcttttatttttccattcattatcaaattattttttctttgcttcctgcatccccacacccatcacacacacacacacgcacacacatgcacatgcatacacagacacgcacacacatcacacgcacacacagccacacgcgccgcgcacacacacacgcatgccaggtaaccactctagctctgctgtgtatttagcatgcagtggtggagtggctatttctcatgagaccatccagaaccattgacttagtttagggcatctcaaagaaacagcttctgtggccggggaggggaggggcaaagatattggggtctggggacaaagtaactgacacatgtttgttcatctgtttcttttagaatataatatccctagatgatggctacagtttctcatcttcccggctatgtcctatcacaatttgcatgctggaattgctcggtcttaggaacttctaataagaatactattctgttatctgaggggggaggggggatggggcccctgctacctgaccttaaacgatgattgaaaaaacgaaaaatgaactgaaatccttaattggcagaaatgtagtatgacaactatccaaaaaggcatctctataagaaatgactaattgacaatctgctgtaccaaaagttggcatttgagcaagatatgacaagtccttagtgagcaacctactgtgtactagatgtcctgctaaacccttgaaccctactaataccttggcctgcacgtctctctcactctgttctgcaagtcaatataagtattaacattcgtgataaataaaaattctctgcatgtttcagcaatccctgtatctcgcgtctgtcttctgtcttccttcctttgtctgtcttttcccaccaaagcacaaggattaaggtggagacctgaatagcttcccccaccacttagttagctgaagcggggggaggggaggagctcttaaaaactgaacgcatcccatctgctgtatacatagaagggggaggaggaggaaccaagaccctaaaagtacttccagccttagtcccaattttgtagcgaatcagaattctagctaatggcatatgttttgcctttgttgagtagtttaaagacatctaaggaattttctctgaatttcacaatcaacgttaaattcattaagcaatagtaaaagtgatgataaacccgccaacccccagtataatatctccatctacatagtaattgcttcaatggaagaattttatgttttagtattacacacccgaattagattttagatttctattttagctgttttatacttgatatactcccacacctattcacatacgtagatgaatactgaacacgttctcaaaatatccgtattttaagacgggaagttttccaattatcatactactgcttagaccaaaatatcaaactgaatgaaagaaacttgtttctggaaatactttctcttgctgtatgcagatttggatatttagtacccgaatgtatttaattttactattgtggaacctcaaaaccaaaggttaatagctttcattacctgtgaagtggagcctgcttttaatgaatgggaatagatttgccctagggggttttgggtaaattctgaattcaaaagtgaacattggggaccatcaaacacatgtccttttaatttataacatctaaataatcgatgttagactgtaataccaaggccggggattcttaatttcagaaatgagctttgattctgcacatacaaagcagacagtcgcacagagcggtcaggactcactccctttcactctaaggtggttgctttaagagtctgggggccagaatcagatttcagatttgtacacaaggcctgaagctcgctcacctccctgtcatctgtgtttctgagattctccggacctgcagcacttttacttaaatggccctgaggggattcctggcaacatctgtcccccctccccaccccagacaccccccaccactaatgagcgtggcccctctgaacttccccagctcttcacccaatgtagaagagcagtggtgcagtgacctgtgaaaggggcttcacgtaggaagggggcgagatgggatccttcagcaggtgaaggcccagaagtacacagacatttattcagaaagaataaatttgtaagtataattctttgagaaaggaaagaccaaatgatttgtggaaggcctgtcgacaggcccgcacttgaccccaccgtccgtccccgccccccacccctgctgctccactgactgccctgccctgctcgtctgctcgtctgctcttgctaattaacctcccttcgcctttcctctgccttaactgtcgtgttctagtctggagagattatatgttttaatttctactccagtctatgaattggtgaatcagccaagtgaatgcttcaaaaactgggactctcaaaagattaaaaaatatatatatacaaaccgtgaaaaagataaactctgtcccctccatctcccattggtttctgcctcggtgactccccccctcttggcctcagtttccctgtcagagaggcaggaccgtagcaccttttttccgcatgacaacgccctcacctcccagggcctaacaggtacagcaggtgtgctgtgtgtgctggttccatttttgggctatagacctgatgagatacatactccacacaagaggccttttcttgccctctaaaaacataaactcgagaaccttccctggctgtgcttctaatgaaggctagtttctgaaaaacatacagcatttggatcagtgtaatgtggtacaaaaattaacattctgttatggtccccagaagccaaagggtgtgtcctttacctgtgggaccagtgaccctgaatatagatcattccataaagaccacgcaggccatcccatgtggctgagttaaactcaaggaaaagctacaaaaccttcaacctctacttaccagagggatctgacctcccctcccccttagattataaggccttctagggggtggaatcttatttgattcctattgcacatggaccaacatgcactaacatcatgaactagaagtttcattgctgctagctgcagtgcctggagcatcgcacatacgacttttttttttttttttttttttttttttgacagagtctcactctcgccctggctggagtgcagtggtgccatctcagcttactgcaacctccgcctcccgggttcaagcaattctcctgcctcagcctccctagtagctgggattacaggtgcatgccaccatgcccagctagtttttttgtgtgtttttagtagagacggggtttcaccatgttggccagactggtctccaactcctgacctcaggcagtctgcccgcctcagcctcccaaagtgctgggattacaggtgtgagccaccgcacccgggctcctgtaatgaactattataaacaccaccacctgtgctcactggttctctcagtatgctagcaactgagttaattccaagtcaaaccatgggactgttttgttccaccccaacctcatagtgacctatcactccagcctcacccctacccagatgttgataggaccaggagaagcctttaggaagtgttagtatgtagtgtgggggcttcaaacccatgaaagattaaatgagctgcatgcaacttctggtacagtcatgattgctaaggcaatttgctaatctgccccgattgggcgtgtcctcagggcacatttgggaggttataatttgcaactatgtttattcagctacctccaatctttgcacagatccgaacccacaactccctgaagaacagaatactatgctttttagtcgggatgtctttatgaaagcagtactcctaactgacatggtgcaatatgattttcttttcttttcaatcccactgcagtgagaaggcaaccaaagtgcaggacatcaaaaacaacctgaaagaggcgattgaagtacgtgctggctccttgtgctgtctgtcttgtagcgccctcccagccagtgctgttccctgaccgctttgctaaatcattttcagaccattgtggccgccatgagcaacctggtgccccccgtggagctggccaaccccgagaaccagttcagagtggactacatcctgagtgtgatgaacgtgcctgactttgacttccctcccgtaagctacaccccgacttgtgtggccttagccccgcccacctgagcacagtgtccatataggaacatgagtgacagccctgcacatgggcaggagcatccaaaccacacttcaggcaaaactacatttcagtgatgtccatccttaggaaaaagttaatttcatgtgtaaccttaatttaataataataatcattagggctttgttcaagatggatgagcaaaattctgtcaccccttctacatcttagctcacctgtcctcacaaataaacatcactcttgaatactacaatctcactttattagattgtaaatttttatgaggaaaaaggtcctgagctatggcaggcttaattattccctcattcacatcttaggacaaaactgtatgttaaatatggcacacaaatactaattgtccatttactccactggaagtgccctaaggtaccttgggatgcctcagtgaagtgccaaatggaagacattctcattttaaacaggtgacctttttattaagagttttctaaagtccttggggcaaatgaaatcttttctcattattaaaaaaaatgaaatatatctaaatcataactcaaaaatcataaaatagaacatatggaaaagactttcctctggatgcacgacactgttggctccctaaagaactacttttagggaacaaaaaactgttcaagcccaagcatataagtttaggccccttcgtggggagaatggcttataagcggggaacgggaaacgagatggaaagatgtatgcgtttgtaagacccacagggaagagacttgtctacagctaaaacaatgagttattgttgccttttgtcaggctttcgtgggaatttgtgtttgtatattttagatggacttggctgcaaacttaaattggagaaatttagtggtatatagttagtatggatagctaaactttttaaatagcattattttgaaaaaaaagcaataaacacaatatgtataatataacccactgactttcttgaaatatgattctatatttaataggaaaaggaaacagcagcctattaaaaatgtatcagaacaataactttttattagtcctactaacatctgaacttttatgttcctacctacaagtcccccatcatcattttttttggtaagattcacattttcccaggaggaaaatttagtcccagcacatcttacaaatgaagtttcttattttcacaacattgaaccatttattggcatattctaacacatttagtgtatattcttcctaaacaattctgtgaagaaactaaattactcagtagcttaccccattccccctacacacgagaaaagaaactacccaaaaccagtaattcacaataagacccagcagctaattgcgtgaacttttgaatatgtttaacgtgttgaattaaagttctttgtgagcattaattcattaattgggctcaaaattcaaaatcacaccaagtgtcggtcacatagggaactctggtctcagggtttgaatgacagtgttgttgattagttcaagctcttgcctttctctaaactttcttgtgttcactttcaggaattctatgagcatgccaaggctctgtgggaggatgaaggagtgcgtgcctgctacgaacgctccaacgagtaccagctgattgactgtgcccagtagtaagtaaccgccacccaacccatcagcacataaaacagacaaaaacaagaaaacatgaaaacctgtgatcctgctttgaaagttacttgttgatgattcctttcttagaagccaaccagttaccccactggcagaaagttctaatctgattcaattgtttatttataaagtccttaattgcattttttttcttttagtgcagcgacattattttacataaacatttaaagcctgttagagcaaaatgatgatgagtttcatagtattcctaattagtaggaagtaattaattgaattgaccctaagcatttagggaaatagggctgtgctcacattttgaataatgtaaaaatactatattttattgctgtaattttaaaacataacaaagaggaatggtgaagacatagctacgcctcctctctccttggtagttgttgattgatctatttctgctctcaggtaagcgactctagtagctgcctagtgttactagatcctagtgactctaggtagagtttgtttttgtgttgtcttgacttttgaactctatttcatatccttatttattccttctcaccgggtcttgattcaaggatggtaagtggtcaatggattttaaatcctaaactgtacacctaagcagtacaataccgtggtggggttattttcaaataaaacaaattactacctgcgaggaggacaggttaaggcctgcagtagcaatgggaaaagcatctttctccaaagtcactcataaaggtgggctcacctggttggtgtgttggcaaatgaagaagggggaacttaaaacacagactttattgcacaactctacctgatgcccaggctgcttcccttgctgcctaacacctgacttaccattgcctcagggatcgccctctgtccctgtcacccaccatggtctctcccagaggacatcgtacccgatagctagaaagttgcctttgaaatagtttatggcttccctcatcttgcacatgatatagcaagcatgtggtggtcagggttatttaaaaaatatgtaaacattattattatttttttgaaacggagtctcactctgtcacccaggctggagtgcagtggtgcgaccttggctcactgcaacctctgcctcctgggttcaagtgattctcctgcctcagcctcccgagtagctgggactacaggtgcctgccgccacaaccagctaatttttgtatttttagtagagatggggtttcaccatattggccaggctggtctcgaactcctgaccttgtgatccacctgcctcggcctcccaaagtgctgggattacaggcatgagccaccgtgcccagccaaaaatgtaaagatatcttctgtttgttgatgctgcagaaatgcacaaagcagtctcagttaatgatattctgaagtaggagtgtcctgtgacttggggcaggggagtctagtagaggtttgatgttttagccatccttattacaagtagctgaaactcggaactgattttgctataggaagtattagctaatcagaaccaaggtgccaggctgactcaccaagggctaagattgctttacttagtagcctcaagcccaaggaactgattgtgaaaaccacctgaataaacaggagggaggaagaggtaatactgttcatctataaatcatataagcctctgttagggtctgcgcaatctatcaaccccagccctgccttcccataggaaattcctttattttcaattgccacatacatagatattccacggtttaatatacaagcaaatgtgtatattttttcaaggaacagaaaaaaacagtccatcttggctggtccctatggcccccagcccccactccttcttcaacaaagtccctgattttctcaaaagttcgaaccaaaagctggaagcgctaattatagtaacgcaaaacaaatggaaatcctggaattgtttgcattttgtattttggatccaagtcagaagttaagtacaggtacaagattaagagagtttaaccaccccagttttgaatgctgggggggcagggagacccagtttcgttaattaacagtagcttagccagattgttgaattttgtcgggtttcgttttctctctcaaatcatttagaagtttttggggtttttttaagcaacacttaattactcctgaaactttgtctgaaaacgcaccatttgtatagatcatgaaaagttttaaggaaactcagagaaaaagagaacaacgcagcttaaaacttttaaaatgtcctccctcacccgtggctcaaacagccctgcatctgccgtggccggcacgtttctggttgaactgcctttatgttaaagttcagatactggtagtgtgcccatttcttaagctgtctatttttatttgttgagctggggtttggctggctccactccagatgtctctctcacaagatttggtgctgatgatctatttatagaactgtggttctgttgccatggtaacatgctggaggccagggcggctggggagctatttctggactggtgctgtaatgtaagattgattgggcaagttagtatatcctctaagccagactaactctgaactagtaaaaaggaagaggggaacagaaaacttaggcagtttctttaaataaacttttctctctttatgattttcttttctcgttagcccgctttaaaacaattccaatctctacatgcccctccctccaaaaaataactggttttaacattaattttccatattaattaccccaatctttcaaaagtaaattttcctgtgtgtctagtcaagcaacacaaacaagatgctttttttaatgaaaagcgtaatatctggagtgttctatttcatggaccaaacagaacggaagagaactttgtgtttgtttcctgttcaggatggctagggcgagaagggcccctttgtgccaacctcttttgttctctttaatcaatgagattcttaaaaagtaaaaaggaagggatacagattctcagtaactaaaacaatctcgtgtgcccttgaggggaaagtccttgatgtttttaagaatgtcactttattgttttttaactgaatgatatagaggtatacaattttcaaactgtttgccattttaatcaagcaatttgaaaattaaaatgtttttgtcaggcattaccaaatggcacagaatgtgataggccagcctggttttggggtcctttctctactggttgatatgcataaaaccttctaaaaatcaagaatattgccagagagcaacaggaataaagaagctaagtaaagaataaaaaagaaaaatagaaaaaataaaaataaacacgaagaacaaagccccaccaccgtgctgtgctgtttgtgtggccccactgcgtcgaggccacaggctagctgctagacgcatctagagttccctgattcctaaaattatttatcttaaatcctgtttgccctaaccttcttaaggcatcagctttgagttacaaatgtaaccaacacacaagcaaatgtgccattgacttagtgctgcataactgtgggacggtcacttccgttgagcctgaccttgtagagagacacaaatagttggcaaattgatgtgagcgctgtgaacaccccacgtgtctttctttttctcccagcttcctggacaagatcgacgtgatcaagcaggctgactatgtgccgagcgatcaggtgtgcaaaacccctccccaccagaggactctgagccctctttccaaactactccagacctttgctttagattggcaattattactgtttcggttggctttggtgagatccattgacctcaattttgtttcaggacctgcttcgctgccgtgtcctgacttctggaatctttgagaccaagttccaggtggacaaagtcaacttccagtaagccaactgttacctttttatataacagagatcatggtttcttgacattcaccccagtccctctggaataaccagctgtcctcctccccaccagcatgtttgacgtgggtggccagcgcgatgaacgccgcaagtggatccagtgcttcaacggtaggatgctgtgggcttggctgttcgtaaagaacgctttgcttctgtgttgttagggatcagggtcgctgctcacgctcttggctttgctctctttggttaagatgtgactgccatcatcttcgtggtggccagcagcagctacaacatggtcatccgggaggacaaccagaccaaccgcctgcaggaggctctgaacctcttcaagagcatctggaacaacaggtttgtggagtgaccgcccaccccctgcgcttgcccaggaggccctggtctgcactgtttatagagaagaaccccgtgcaagcattccagacccctggccgaaagcgcgcttctcccaagcattcacacggcctcccttcttgtagatggctgcgcaccatctctgtgatcctgttcctcaacaagcaagatctgctcgctgagaaagtccttgctgggaaatcgaagattgaggactactttccagaatttgctcgctacactactcctgaggatggtgtgtatggcttccactcttgctggctgttcattgcggtggttctttttcaaacggtcaggctgaaaacccccatccccctcccaccaccaaaccataaaggatctataagagaagcaagaaaaacgcactcccactaattctcatatggaaaaatcagggttttgaagacttcaggagctacagagatgctagcaccccagctctgcttgaattttaaattacattaatatgtattccctttttatatagctactcccgagcccggagaggacccacgcgtgacccgggccaagtacttcattcgagatgagtttctggtgagtcgagcctgtctttagtttcctctcttgttcctcctctttttctcatggatgtaaatttacttaattccaaattcaggggttcagctacccagttccatggttttagttcacgcacatccagtgtggatttgagctctttgcgcccctctttttgcttttgttttcatatgacatcagaggctggctgacagccgtccctggtaggtgtccccatcagggatagggtggttcctggcgagggtgtcactgacaagtccccttgtttgtgcccgcagaggatcagcactgccagtggagatgggcgtcactactgctaccctcatttcacctgcgctgtggacactgagaacatccgccgtgtgttcaacgactgccgtgacatcattcagcgcatgcaccttcgtcagtacgagctgctctaagaagggaacccccaaatttaattaaagccttaagcacaattaattaaaagtgaaacgtaattgtacaagcagttaatcacccaccatagggcatgattaacaaagcaacctttcccttcccccgagtgattttgcgaaacccccttttcccttcagcttgcttagatgttccaaatttagaaagcttaaggcggcctacagaaaaaggaaaaaaggccacaaaagttccctctcactttcagtaaaaataaataaaacagcagcagcaaacaaataaaatgaaataaaagaaacaaatgaaataaatattgtgttgtgcagcattaaaaaaaatcaaaataaaaattaaatgtgagcaaagaatgatgggactcccgtgagttatttgtggttctgagcaaattcccgtcattcatggttttgacttggtccttaggtcaaaagttgggaggccccaaggtgaagtgggtataaaatctcaccactgtatgttttctggtgaccctaatctgtaggtgtcttgaaacaatttgcagacaataggaaaagtccactcctgttcctcctaaatttcaccccatagtgaaccactatgccccagtcagtcacctctgcattttgatcattgccatcctatccaaagattctaccaacaactcacaccgttacgtcatcacacagtttgcctgctgacccaggcttcccaagaaaagtagtgtatgttttgctataagataagatagggactaaattatgtggaggagaaatagaggagcacagtgtttccaatcaatggggttattcaagaaatggtgtagccatttggggaaaattgaggctggatccctacctcattgcacacaccaaaatgaatttgacataagttgatcacatacatctaaataaaagaggtactttttaaagtggctattttataattaaaaccttgggtttttaaagggcctctctgcagcataacctaagacctaaaggccataacggggttggggatgactataaaaacgaaaatcacacgtaaaatttgaatgggggaagggcctgggtcaggtagaaatttaacaaagggtttacttccctaataagcaaagagttcttatgaattaataagcaaaaccatcagaaaaatgggcacagtatataagcatgcaacttaaatacaaataataagcctctggggatatgtgggacatcactcataaatattcaccataattgggagtggggatgggggtccacactcacgggttgaagtgtggcttatttctgaggtcctgtgggttccctagactttcacccctacgcttatcccccaaggtgtagtctcatatgtggtcacttcctgggtggcttccaggaagggtgggaggaagtgatcagcatcaacgatggtgccctctgaagctggccaaatgggacttcaagttcattctgtaatccaggtcccaaatccacttcctattctagtttccagatcaaattactctcacccaaattaatcatatagtgtagctcaccagaggtgagcgatgagccccacgggggtgcagaaaagtagcaaatacctgcatctccatccaactttcacgtaacattcagtccacatgttcttgctatgcaatttttagtacaaagccctcaaaagccccccaaatataaaatccaagtaaaaatcggggcttgctatgcaaatacagctgaaagactagcccacaagttcccataatcctccaaagcaccccaaataaacacacataaaacctggacagtggctatcaagtgcaaccacaagaccagcgtgccacacaaacattcatccaggtaaaggctgtgctcagtgaaaatcaaggttgaactccagcccctagctcctcttccaagatggctccctgtatgtcccttttacatagaaattctggaaccttcttagcataatccacatgagattgtcacagctctagccacatatccatcaaaattagaaaacacaaaattcccaggccagagatgccaaggaaaatgataccacagaaccccaccttgttggtcataactgacagagacttcatggtatcttctagaagaagggtcacaaaagtcacagttatcaggtatctactagtgctagccattacccaatgggataggttcagctgctattttgacaatgagtaaaagaggcccagagagaccccaagagacgtctccagtgagcagggaagatgcgcttcaaactcaagtagccaaaggccactgcttggtccctacaagatactgttgtcctggaagatgcaggagaaaagagaaaaaggtctcctggtgttcttcccattatgtcagttatcaggagtccatgacctgtgacccccatcgaaaatcctgcaggtcaccatgggattccacagccaggtgggtgagtggggcctcttcccacagaccgtggcactggccatactcctgcctccctaccaggtcagggctttgtccccaccagtcaccccgttgcgtttgagacttgcttccctatgttaggcttcattgctgctatttaaaacatttttgtttcccttttccctctgaccctggtgccaagcaaaacttctacagagctattttcaaatctaaattttaggatattcaaaaaacaaaaaattataaagactttcatttaaatctttgattacaagaagccattttaaaaaaaaagatttttttaatctgaatgcctgtaatcccagcactttgggaggccgaggtgggcggatcacgaggtcaggagatggagaccatcctggccaacagggtgaaaccccctctctactaaaaatacaaaaaattagccgggtgtggtggcgggcacctgtagtcccagctactcaggaggctgaggcaggagaatggcgtgaacccgggaggcagagtttgcagtgagctgagatcgcgccactgcactccagcctgggcaacagagcaagagtccatctcaaaaaaaaaaaaaaaaaatttaatctgacgtttaaatctctattaaagtgcaaagcaacctatttttctaaaggtagcgatttgcaccacactttgtagagatgtgtaaaccaaatattataaatgactattcattgaccttttggattgaacatgataataataaaccattagggcccttcacagtatgagaagggtctagaattggacagaatttttatttacctccacttttacttaaatgtgcacaaaattatgcctcccaaaatggccacatctgcatagcccttctatgtagaccatggcatcctcttattatagtactttcttggatggctttggtcatcttttcactcaataaatacatagagactatgggatccatgccagccagtgggaatcctgatctcatggggttcatgttctagcgagagagacacacacttactaaataaataataaaaagaattacagatggtgacaaaatctctgaagcaataagcaggatgcaggcagtggggaatgggagatatttgaggagggatttcactttagatggaacagctagggagggcctctctgatgtagtacattttcttctgagaatgtgaaggatgagaagcagccagccatcaagtactaatagctaacatcattatttaaaattgttattaaaacataattaatggccaggtgcggtggctcacacctgtaatcccagcactttgggagtccgaggcgggcagatcacctgaggtcaggagttcgagaccatcctggccaacatggtaaaaccctgtctttactaaaaatacaaaaaattagtcaggcgtggtggcaggtgcctgtagtcccagctactcaggaggctgaggcaaggagaatcgggaggcaaggagaatctgcctctgggaggcagaggttgcagtgagctgagatcgtgccactgcactccagcctggtgacagagcgagactctgtctcaataataataataataataataataaacatttttggaggactttactatgtgccaggtactgttctacactctgtatatggatgatctcatttaatcctttcaaagccctattaaaaaccatcccatcatttgtacaacaggtcctatcccattgtgcagtagttagctcaaacatgaaaaaggtaaatcatatctaaagcattgtgaataatttaagcaaattatgctttttaataaaggttacactaaaaaggtcattgcaataagcacttaatttaagtaattgttacacaggttcctatttcagagctggaggactttgcatctctaggataattttcccacattaaaaaatgcatgcatatgctacgaacaccaagtcttctcattttgcctattttatttaccgtatcagttaagaatgcattcagctgcaagtaacagaatcctgacccagagtggcacggacaaacagaagtttatatccacttatcaagaattctagaggtaggtggttcctgttatttcagcagctcatcaatggcaggactaatgtgtccacaattctcttggcttctctctcatggttgcaagacagtatcacagaacagctgaaggcagaagaggaagggagagacaacccaaactaatctcttttgtcctctttttgtcagtgtttcatagaggcctcttcattcatgcttcaccatgtgaaatacacatagatacccagctatatatgcgtacttcgaaaagtaaaagtaacagatagaaaagtatccctccctccttctctccttcctcccctcccctccctccctccctcccttcctttccttccttccttcttctgtctttttagacagagtctcactctgttgcccaggctgaagtgcagtggcgtgatcttagtatgctgcaacctctacttcccaggtttaagcaattcttctgcctcagcctccagagtagctgggacgacagatgcccactgccacgcgcagctaattttttgtatttttagtagagatggggtttcaccacgttggccaggctggtctcaaactcctgacctcaagtgatccacccacctcagcctcccaaaggactgcgattacaggcatgagccactgaacctggctgtatcttttcaataacactattatgcatacacacatagatagggattttattttttatttttatttttatttttgagatggagtttcgctcttgttgcccaggctggagtgcaatggcacaatcttcagtcactggaacctccgcctcctgggttcaagcaattcttctgcctcagcctcccaaggagctggaattacaggcatgcgccaccacgcccagctaattttgtatctttagtagagttgaggtttcactatattggtcaggctggtctcaaactcctgaccccaggtgatccacccacctcggcctcccaaagtgctgggattccaggcgtgagccactgcgcccggttgagagggatttataatttcctgttgtatgcaccttgacggaacatctgaaaaaaacatatccaatgcctgtagttttaaggcttagggaagatattagggggaataaaaccctttcaagtcataagagaacaatttgcataattctacgtaaataagttagaaagcctagatgaaatagaaaatcatccaaaaaaatacttcttaccaaaattgaccccagcagagacatcataaatctaagctgaccagttaccatagaaaaacacaaagcacagtgagaggcctccatgacaaaaaggctccagactctcgctgggatgggaagctaatgacaagaaggaaacatgagggaaacttctggggtgctagcaagtttctattcttgatctaaatgctggttaaacaaatatatcccatttgagaaaattcatttgactgtacacttaggatttggaactttttagtacatgtattatatatatatatttttttttttaatgaggaaaaggaaaaaggcaccaggcccaggtggtttcacaggggaattatattaaacctttaaaagtcaaataatccctgtgctacttatattattccagaccataacataataaaaggaaaacctcaaaattatttttataaagtataccactgattccaaaacatgccaaagattgcacccaaaaataaaattacagattaatttcacttatgaatatcaatataaatattttaaaatataagcaaacataattccatattacattaaaaataatacatcatgcctggtaagatttattctaggaattcaaggtttgttcaatatgaacaaatacagtaatatatgccaaaatttaatactgattcatattttagaaatccaacaaaatagtaatgaatggatgcttttctaatataaagactctctctatatataccacatatctatatatacttagtacagtatatatcatgtatataaataaaatctccaaaagtcaacattttaattaatgaggagcttctaaaagcttttccactaatgtcaggaataagaaacaagaaacacaaggatgcctcacatcatcactctctttatcattgtatgagatgaataagccaattcaattaggcaaaagaaagcaatgagagacctagaattggaaggggagaagcaaaactatctttttgacaggtgcagtggctcatacctgtaatcccagcactttgggaggccgaggcgggtggatcacgaggtcaggagatcaagaccatcctggctaacacagtgaaaccccgtctctactaaaaacacaaaaaaattagccgggcgtgctagcgggcgcctgtagtcccgtgaaccccggaggcggagcttgcagtgagctgagatcgcgccactgcactccagcctaggcgccaaagtgagactccgtcccaaaaaaaaaaaaaaaaaaaaaaattaaaaaattagccagatgtggtggcacatgcctgcagttccagctacctgggaggctgaggtggccagacaacttgagcccaggaagccgaggcttcagtgagccatgttcatgccactgtactccagcctcagtgacagagtgagaccctgttgcaaaaaaaaataaaaataacaggtgattattattataactctcccctccaaaaatccacggaaaaatcattactaaaaagtgaaaggatttagtaaagtacaaagtacagatttataagattaacatgtaaaaatcaataccagcctaggcacagtgtgcatgcctatagtcctagctacttgggaggctgaggcaagaggatcatttgagcctagaagttcgaggctgcagtgaggtatgattgtgccactgtactccagcctatgcaacaacaacgagaccccatctctaaaataataataatattttaaaaaatcaatagcaggctggccacaggggcttatgactgtaatcccagcactttgggaggctaaggtgggaagattgcctgagccaaggaattggagaccagcctgggcaacatggcaagaccccgtctcttaaaaagaaaaaaatttttttaatcaatagcatgtgaaaggtaaaacaagaaagctttaagaagaaaatacaggctgggtgtggtggctcacacctgtaatcccagcactttgggaggccgaggcgggcagatcatgaggtcaggaattcgagaccagcctgaccaccatggtaaaaccctatctctactaaaaatacaaaaattagctggatgtggtggcatgtgcctgtaatcccagctactcaggagcctgaggtaggagaatcccttaaacctgggaggcagaggttgcagtgagccaagatagtgccactgcactccatccagcctgggagacagagcgagactccatttcaaaaaaaaaaaaaaaagaagaagaagaagaagaaaatacaagagactactgcttgcgtacggtccccatgttacatttggctgattcatctcctaaatcccgtgtcatctgtgggttacctcttctctttttctcgccccttatacgattccaactcagaaactgagttgtttgtcctctagagttttccatattccagattttgctgattgcatccccatattataaaccttctgatttgaacaaaccaactattttttaaaaagtatgaaatcatcagataaatttaaacaatggctggatatttgacaatactaagaaaactagtgttaacgtttttgtgtggataggagcatcatgattttcatgaattcttatctttcagatatacctactgaaacaaaataatatgatgttccaaaatcatacagtggggtgaaggcaggagttggagccatgctggaaattgttttgctacaggctctcctgtggtaagtgggtgaccgtggggagccttgatgttagtgtttgccaattcccatggtgtaaatcccccactgtgattgatttcaaactcccagcagtatgccattggatatggagttgggaagagatgggcacagtcagctccagcacaccactgataggagggtggaggtgaaacaagattggccatgaggtgatgcttgttaaaacagggtgatcagtacatgggggtccattgcactattctaattttctatgtgttggctattttaagcaaaagtttacaaacaaggggccaggcgcagtggcttatacctgtaatcccagtaatttagaaggcaaaggtggtaggatcccttgaagccaggagtttgaggctgcagtgagctactccactgtactccagcctgggcaacagagcaagaccctgtctctaaaataaaataaagtaaaacaaattaagaaaaagagaaagaaaaatcttacatttccagattaacgtttttaaaacttccaatgttaatgatgacactaggacaggcacagtggctcatgcctgtaatcctagcactttgggagaccaaggcgggtggatcacttgagtccagaagttcgagatcagcctggataacatggcaaaaccccgtctttctacaaaaaaaaaaaaaaaaaaaaaaaattagctgggcgtggtggcatgcatctgtagtcccagctacttaggaggctgaagcaggaggatcgcctgaattcaggaagtggaagttgcagtgagccaagatggagccactatactccagcatgggcaatggagtgagaccctgtctaaaaaaaaaaaaaggaatgatgattaatagtaagagcaactatgttgttgagagcctactatctacctgtccctaatttaagcactttacagggaataactcaagatgtttttatccttgctttacagatgaggaaaccaaggagtagaaagttgagcaactggccaggcgcagtggctcacgcctgtaatcccagcactctgggaggctgaggtgggtggatcacctgaggtcaggagttcaagaccagcctggccaatatggtgaaaccccatctctactaaaaatacaaaaattagccgggcatggtggtgcacacctgtagtcccagctatagggaggctgaggcaggagaattgctccaaccaggaggcagaggttgcagtgagccaagatcatgccactgcactccaggctgggcaacagagtgagactctgtctcaaaaaaaaaaaaagaaagaaagaaagaaagaaagaaagttgaacaacttccttggttcaagatcacatagctaataagtggtagagtccagattcaaacccaggtagccaggctcctgcaactttaaattctaacccaagacacatttttttttttgcttttaaggagaataagtttaacaggcaagaaagaaggaacaagaaaacagctcccccatacagagacagaaggaggggggatttgaacagagagaaaacccccaacgcaaggtgcttgattcaagaaaacacccaagattgtaagattggaaagaaatgcagtggtgttgctgaatgatggataatatgttgtttaggagatctttttcccaaccacaactttgttgagtgcctccttagggctaaggctgaacaagatgatggtgcccaggacaggctggttttgttcaaatggggcattccctgtactgtgaggcaaatcacatttccaaagtggggtttcatctatatggggcttggtgaggtagaggagagggggattattgatataaatttctgggttagtctttcatcaccatgatggtctggtaatttcttggtataaatctactaggagtaattttttcatattttaagaacaaatgttttcatcctttgtcatagcacagacttttatccattcagcaagtatttattagacactcaacaatccgccaagccctgtgctaggtggtcaggtgacagcagccaatggggtagaaaaccattctcatgctagagggagaactgagatgatacaatggtaaccaaataaataattaagataattcagacagtcacaaagtttatctacagcaagctcatgtggtgtggtggttgtaggggtatcattttagaaggtgttgctagggaagaactctctgagggggtaatctttgaactgagactcaaagggtgggaagagggtgaaggttggagaaaggagcttgaggtggcagatgcccccacgaggaaggccctggggcacaccacaaatttccagcatacattttgagacaaaactgtatttttgtaattaatgactttcacatcttgctgcttagagatccttgcatctctaaggatcttccgtttccaaaattggtgacacacactttcctgggaggaggtgggatttggggttgcatgcagaggagagtgaaggagggtagggctcaggtgtcagagtctgggataaaaggcgctgctgtatccgtggagcccaaagcagtgcctggcacaaagccaacagtccttgaagagatgtgaaatgaaccaactggggaaataggggggcgtttccatcacttttctctggaaattgacggccttgtcaaggtggcttttgcaataatgggaaggcaagtctaggaaccccgtctacctgcagtcctcctcacatacacacttcactgcttcagagatgaagttcaagtttgagaaaaattgagatcagccaatagaaataaggatccatgaaccagagataagaattggttcttctctttttccaaaaggagagaaataaagaaaaaatattgtgaccctgttccccaaggtcaggttgtctcaaaggaaacagagtgtcccatcaaatggagtttgagggaagaaagacattgagaaatggaaaattgagtgcagggttgggattaccaaacagctcctggagcaaaggttaagaatgcttttgtgttttcccatcatttatcccctgattggtacttgctttagtattttatagctcattagcaaacagcattcttggaaattgtaggaactggccagggagggcattctgaactgcgttctttaggtttttatgatttgaaactgaaggatcactaaaaatcacattgcatttggtaaatctgtagttattcaatatttccctctctcagtttcatccttccgtctgaattatagccttcagtagcagtgttcagaatgacaaatttttttctgatggctcttgagattgaaatgtcttggcctcctaaagtatgggggagctctttaatctagtttcattcagctaattgggtactaaaatgttatccttaattccaaaccgaaaaactttttgtaccagatcatacttagattggccttaaaaagctatcagtcaaagaaacagaggctcctaatgagaaatggtaaaagctgagggagaaaccagactgctgatatgcaaaattttaaggaaatattaaagtttactcatcttctcaaagaagagaattatcatcactggaatagctagaataattcttatttgtttctaggaacaagaattgaatgcagaaatggctaaattgcacaaaagagtagaggccttttcttaattagaagtggaaatgcaaaaattgattacctgcaagtactgttgctgtgaattaaacttgctttacctggttcaatttacagcaacagtacatgacaacaaagtgttaagcctttacccataaaattatagctcattgtacaaccgagaaattatcccacatggaattatataattgccttcatccacaactataagcatttctgttaccttcctatagaagttaaaatattctcatagcagtttcagcaataaattgaaattgtaatagtagtttatcatttgccttaaggtttttacttttactaagaactaatagtagtggagaaaccattgaaattcttggtgtgggccaagaattcttttgagagcctgtgacaatataagttcactcaagtcatgttcaagtctcagtgaaacttgattccacaaaggcagtacgtaggttgaaaataaatgctgagtcttttatttctttatgtctaaaaaaagaaagaaaaaagctttttcacttgcttacctcaaataaacatttaaattttcattcggaagccgaggtgggcaggtcacttgaggtcaggagtttgacaccagcctggctaacatggcgaaaccccgcctctactaaaaatacaaaaattagccaggcatgctggcacgtgcctgtagttccatagtcccagctactcgggaggctgaggcaggtgaatcacttgaacgcaggaggcagaggttgcagtgagccaggattgcaccattgcactccagtctgggtgacagagtgagaccctctctcaaaaaaaaaaaaaaaaaaaaaaaagtcacttttttgcaattataaaaagacatagaattaactgatctacacatctgaccacagtgagggctttgtcatggataattcagtgcatcttctgaaacccaaatcttcactgtgagagtttaaattcattggagttttgaggattaatttctgtcgctgctcttgaaataaacaatgccaatgaattttcttttgcatgcatttgttagcgctagttcaacaatggtaacatttagaagaatgctgccatattgggctttgcttcttgctcatttgatttttcctacaatgatactgatgctttgggtctccttctcccatgcttgacacactttttacaaagtaagctctaaatcatagcaaacaaaatgcagactatagcgaaagggcttaccatagaatgcaaaggatgagtatcacgaagtttgcctatataccgtccatgttaatgggtcaaaagagaagacgcctttggcagcttaatagggttgaaaggcatctaagagcattgagtccctttctgttttgttttgttttgttttttaaacaaaagcccttggcaaaatgataattaaaaaatgcttgtttgatgtcatttcatgtgtgtgcctgtgcatgtatggatccaacagccagcaatattcttaatattcttgaagtcaggaacaacaaaacagtacctattctcaccactattaattttggtctggaagtgatggttcgcacaattagaccaaaaaaaattgaagtcgaaaatatgagaaaggagaaggtaatattgtgattacgtgtggatgatatgattgtacagcttagaaaacccccacagaaaattcacctggtgtacgataataaaagcttaacactcactgagtgcccaggccccattctaagtctcttaatactcgtatactatctaactataataataaaagttagcattgatggagtacttaccatgcacacgtgtactacttaagtgcttgctattcttacaccatacaaccacaacggtaagattctcataggcactgagtgtctattacgtgccagaccctgttgaaatactttaatgctcataacaattaagaggctttaaatcctatttctgttacataatataaattaacatattactacaaatgtatttctataatatactttatagtgtaattatacttatgtaatatgttacatattaaattgcatataatttatattacattatatagtttatatgttataggttattaatattgttatattttatattactacatatttatatttatatattcatgtgttacaattatacatgtacaaagtgatatgatattgtatattgttatatataatttatatcatattatatgacaatatattatattttattatatggattaaggctacataacttcaatttaaatgtataacttttatatcattttctaattatatatgcataactcgatatattacattaaattatataatttatattatactgtgctacattatattttattatatattataacactgtacttttacattactacatatttatatttacacagtatatttcatatcatataattacacctgtataaggtgaattacatattacatattaaaccatatataatttatattatattagactaccttacattatattttaaaatctcactgtttataaaggcagaaactgaggctccgagaggtgtcccttgccagaagtcagggagcagctcacgggcagagctggggttccagccccactttggttccagaagcccagcttttaaccctcaggaaccgtccaagaccttgcctggtggaggggagcttcacctgcctgctcactcgctactttgacaggaagtagcaacagccctgccaagggccacagttgtatgaatgtgtgtgagtatgggtgtgtataacagtgtgtgtggggtgtgtgcaagagtgtgtgtgtgcgtgtgcgtgtgtgtaaggcagtcattttttaaatcccagatgaagcatggtggctcacgcctgtaatcccagcacttttggaggccaaggcaggaggatcgcttaaggtcaggagttcgagaccagcctggccaacatggtaaaaccctgtctctacaaaaaatgcaaaaattagccatgcacatgcagcccaggacagctttgaatgtggcccaacacaaattcataaactgtcttacaacattaggagatttttcttttaactcaccagctattgctagtatattttatgtgcagcccaagacaattcttcttccagtgtggtccagggaaggcaagagatcggacagctctgctctaagttaactctaaatttaatgcaaccccagagtaacctgatctttttaatgtggcaaaatcatcttatagttcatctggaagaataaattatctcagagaatagcaaatagaattccaacagtgaaggctgttggccatggggttgccctaccagatatcacacatattataacacgttctagtgtggttctagtacaggaacagacagagcctgggaacaaaacagaagaccagaaacaggccaaagtttatggaaatttaatatatgatcaaaggggcattcagatgtattagtcgggatttgttatatgtaacagaaatgcaatataaaataccttaaacaaaaggcaaaattagttgaaaggttcctaatactctgtaaagagcaagggtgtatatctgcatttggcctcattcccctagaccaaatctctttttcagtctgtgacaaagcctgtcccaagcttcagagcttccaacctcaccgtcacaggctgagaagcaggcaacgggctgagcagtgtattcactggcgtgcttctatttctattaaaaggcggttagtgtgcatgtggtgttgaggggagaatgtatctttgtgtgaatatgcttaaaaggcctaactggtattactggatgccccagggaggagatacacagcagtgatcttttcccccctattggatctccggaggtgggaatcgttatcttcctcattctgtggccagactttcactggtgtgtgcaaggtgcttgttttatttatttacttattccccttagctgcacttctctttgcctgtaggcagcaattccagtatgtctgatatgttccttctctttgtgttattgaaaaacatgtacattgtttggggcacattgtttttattatttatgtattttatttatttttgagacggggtctcactctgtcacccaggctggagtgcatgacgcaatctcagctcactgcagccttgacctcccaggctcaagcgatcctccccactcagcctcgtgagtagctgggactacagacacacaccaccatgctgagctaatttttgtatttttagtagaggcgaggtttcaccgtgtcaccaagactggtcttgaactccttggctgaagcaatctgcctgccctggcctcccaaagtgctgcgattataggcatgagccaccatccccagccaaagggcccattatttttaattggcacaaatgatatgcttacagatctcattctgtgtcttcctcacccggctctgtttctcagatctatgcacattgctgtgtgtgtgctgtcattgcttccagtgtctacatgtttccctgcgtcagtcaggatagagtaggttatgttgctgtaacatacactcctgagacagtaacagtttaggcacaaatgctcatttctcattcagaccgcatgaccactgtagaccaacaggagggttctgctcttgttatcacccagggacctaggtgccctctctattactgtcgcttgctatgccagacaaaaaggcacagcaaagcattccctgactcatttggtagtggtacacgtcacttctgcacacatttccatgcccagataagtcacccggctccacctaaccccatatggcagggaagttccattctagcatgtggcagcaggagaggaaagctggcacttctagaacagtcctgatgatcctgatgattactatggaccccccaggctgccttccactccctgctacaccaaacaaggctgtgtggactcatgcctgcacaaggcgcctacagacccagaggacacagctttgggacacatacccagcagtggggtttctgggtagaagagcaggcacttaatttcactaaagagtgctggagtgttctccagagcataagacaggtgactaagaacaacagcagcaccaagaggtgcagtcttctaacacctagaggttccgagaggaccataacagaaaccagccgagaaagaaagttctgagaaggaaacggcaattaggagacggccaagggaagccagtgtttcaagaggaatggagtggtcacctctgtctagtgcttctaggggccagaaaagatgaaatccctgcaaacttatccagtgggagtagggggacagataaaacaagatttgcaaatattgataattattgaagttgggaaactgagggtcattatattagtctctcttcttttgaatacgtttgaacactttttttttttttttttttttttgagatggagtttcgctcttatcgcccaggctgaagtgcggtggcacaatctcggctcactgcaacctccgcctcccaggttcaagtgattctcctgcctctgcctcctgagtagctgggattacaggcacatgccaccatgcccagctaacttttatatttttagtagagacagggtttcaccatgttggccaggctggtctccaactcctgatctcaggtgatccgcccccaccttggcctcccaaattgctgggattacaggcctgagccaccgcacctagcctgcattatttatgaatttagacaggtaggtaaagggcaaaagctagactgggaagaaatgagatttgtgggaactgaggaaatggagattaggaaagtcaaaatggaaggctgtgtttctcatgaatgcccctagcaacatgttcagttccacatgcgcttccagaaccttccctctccccatcaagaggcggagtctacccccataccctttaatctgggcacacacacctgtggcttcactcttctctccaacagagaacagtgatttgctgctgtgacccctgaggctgggtcataaaaagcataagctttcctgattcatattcattctcattctccctctctctcgctctctgttgcaataaaatacacagaatataaaatttgccatcttagccattttttttttttgagacggagtttcactctgtcgcccaggctggagggcagtggagcgatctcggttcactgcaagctccgcctcccgggttcacgccattctcctgcctcagcctcccgagtagctaggactacaggtgcccgccaccactcccggctttttgcatttttagtagagacagggtttcaccatgttagccaggatggtcttgatctcctgacctcgtgatcggcccacctcggcctcccaaagtgctgagactacaggcctgagccaccgggcccggcccatcttagccatttctaagtgtgcagtagagttaagcacattcccagtgttgtccatctgtcttcagaaccctcttcaccttgcaaacctgactctgtccctattcaacaactccccattccacctccagccagcccctggcgaccacccttctattttctgtctctatgaatttgaccacctctggttctcttttttagtatatttgtgcttgaaatgcaggtgccctgctgtgaagaagcccagagtcatccaggacaacatggaggggtgcaagtggggaggaactgaggccccagctgacagtgaccttcagccaccatacctgtgggcaaacacaccttctggtgatcccagcccagcttttgaagcaaatagctgaagctcagacctggtggagccgaaatgagctgtccctactgagcgctgtctgaattattggcccatggaaactattacaataatcaacgtcactaagtgcgggggtaatccacacacttttttgaagcgtgtattgaagccacaggaactggaacaggagagaactctcacatggagttcgtctgtggagaaggagaaacatggagtagtggccagaggaagttaagccaagaaaagttgtttttgtttcattttgcttttttttttttttttgagacagagtttcactcttgttgcccaggctggagtgcagtggcgtgatttcggctcactgcaacctctgcctcctgggttcaagcaattctcctgtctcagacttccgagtagctggcattacaggcatgtgccaccacacctggctaatttttgtatttttagtagagacggagtttcatcatattggtcaggctgatttcaaactcctgacttcagatgatctgcccacctcagcctcccaaagtgctgggattagaggcgtcagccaccatgcctggccttgctttttaagattgaagcaatctgagtgtttcaatgttgaggataaaggagggagagattgaatatgcagatgaaaggggaattatccaaagaagacgactccagagagggcggagtgcagaggatcctcagcacaggtggggccctgggagggacagcccgatgctgacagggtgaaccttcagtgctaggtgggtgacagggtgcttgcacgtggactgttttctctccgcaatagaaggtgggaagggtgaaggtaggaaatggtgaagtcagaggtttgaggagagaatagaaagtttgacacatctttgtagagaaagggagaatgtgttgacttgaggaaagaaggatttgagaacagatggcttagttgatgttggtgatcaggaattgctgggaaatcaggttatcctgttgtgggcttctgtccgcagaacttagctacttaggtatatgcatgatacatacttgattcatcccagactggggttctgccaacacatgtcatcagagggtaaagagcaatgggtttagggtgttagcaagagggtggttgacaggatggaccatgaaactgaagctggggaaagagaacaatcagtgtgtgtgtgtgtgtgtgtatgcatgtgcgtgtgcgtgtgtgtgtgtgtgtgtgtgtgtgtgatggtgggggttggggggaactaatgtataaactttgattcagcatttctacttctaggactttatctgaaaaagagcattgtgccactggccctacttgcaaggactttcatcacagaatcacataaaatattgaaagatttgaaactaggcaaatattcattaattgagtcttggttaaataaaacagaacactatccagccacctcaatgccttttgggacgcaggcatgggaaaagggaattgtagggtcctggaagccatcctctttgtcacaaggaaagcacactgacaaagggacaggaggaggtggcacagagagaggagggaggcaggagacctagtctgatcctgataactcggatgtctggtttcagtgatgtgtaaaatgagcttctggattccccagttacatgagacaggtaatcctctcttttgaccaatctagtttgaataaggtttctgaggtttgcaattcaaagcaccctgctatggtttgaatgtgttctccacaaattcataggtacaaaccctaactcccaaggcaatggtattaggaggtggggactttgaggggtcattagatcatgagagcttcccccatgaatgggattagtgccttcataaaacatgaggccccagggagctgccttgccccttccaccatgtacagatacagtaagaaggtgccatctataagaaagaagccctcaccagatgctgcctgtgtgccttaatcttggacttctcaacctccagaactgtgagcaataaatatctgccattcacaaaccaccctgtctatagtatattgttatagcagcctgaacagactaagagactaagaaaccacccccccacccaccggcctcaactaaaatgaaagttgctaacagaagtagagggttaaaagaagcagaatcttaaaatgttgaactggctgaagtgagatgaggcgggttggaaatgtcattatgtagtagataagctggtgttaaactctggctgcttgcttgtgagaattagatcatttgaccactgaagttggaccttcaggtaaattggcagaaaaatatcagactattggagggttgacagcttcacagggcttcccacctttcatgtgaaggatttctccttctctgtttgtagcaaaactaatggacccatgaatcacagcacctctgtaccactaagaggtcggcaaatcagtctctgtctctgttggaaaatgctatttatcctagaagataagtacttttaaaatatcacaatatcattatcacacctacaagtatcaacaacattcccttaatatcatcaaataacccctcacttgtccattttcaatttgaaattgtctcatgaattattttagcattaaaaagataagaattcaagaaacaagattccttgacatgacttccaggtctctgaatttataagtcctcctctatctccctgttttcttccttaaaatggtttatttcccacagtctggaattcgtttattgaattcctgaattcaataacgaagattggccgctgggcctagaggcttcatcagattcaaatctgattttgttacaagatgactttacaggcggtgctgtgtacttccattgggaaaaacagaacgtcttgctttctctccttttattgtgaacaaccattgatattgaatatctgcattcactaattctccagaggctgaaaaatcgtcaaaatccaattttagcattctctttccatgtattatgcttcttgaaaaagaaacttcctcccatccatatttggttacatgaatatacagtcgttataggaaaggcaagataagtgcttgatcccctctctttactcattttcaaaacaatgtatagatcccctggcatcctccaactgtgatcaattattactgtcattattaattataatttatttagtatcatactgacattttcgatgtgatgtgcttcagtctattgcaggtttattcttattaatatctaaagagttcagcctgcagtgagaacacatggacacagagaggggaacgacacaccctggggcccgtcggggagtagggagggagagcattagggaaaacagctaatgcacgctgggcttaatacctaggtgataggttgataggtgcagcaaaccaccatggcacacgtttacctacgtaacaagcttgcacatcccacacgtatgtcccagaacttaaaataaaaataaaaaataaagaatgcagaagaaaaaaaagggtttggttggctggtagctcacctctgtaattccaacactctgggaggccaaggtgggcagattacttgagctcaggagattaagaccagcctgagcaacatggtgaaacaccatctctactaaaaatacaaaaattagccaggtgtggcggtgcacgtctgtagtcccagctacttgtgggactgaggcaggaggatcacttgaaccgaaaaggtcgaggctgcagtgagctgagatggcaccactgtacactccagcctgggtgacaaagtgagaccctgtctcaaaaaaaaagttccaagcctggcgcggtggcttatgcctgtaatcccagcactttgggaggctgaggcgggcggatcacttgaggtcaggagttcgagaccagcctgcccaacatggtgaaacccagtctctactaaaaatacaaaaattagcggggcatgttggtacatgcctgtaatcccacctacttgggaggatgaggcaggagaatcgcttgaacccaggaggcggaggttgcagtaagccaagaccgcgccactgcactccagcctgggcaacacgagcaaaacttcatctcaaaaacaaaccaactaacaaacaaacaaagttccacctaactgacatatacagaccatttcgtgcaacagcagcagaaaacacgttcttctcaagcacacatagaatgttctctaggatagatcatagatcatatgctaggccaaaaaccaaatcttaacataattaagaagaattgaaatcgtatcaagtatcttatcttttccacaatggtatgaaactagaaatcactaacagaaagaatttcagaaaattcacagttatgtggaaattaagcaacaggctccttaacaacaaatgaagctaaaaagaaatttaaaattatcttgagggctgggcacggtggctcacacctatgatcgtagcgctttgggaggccaaggtgggaggattgcctgatcccaggcaacacggtgagatcctgtctctataaaacacagaaaaattagccaggtgtggtggtgcatgctggtagtcccagctgcttgggaggctgagatgggaagatcacttgagtccaggtgtgcaaggttatagtgagctatgatcatgccactacactccagcctgggcaacagagtgacacactgtctctaaaaataaataaaataaaatattttgagactaacaagaatggaaacataacataccagaatttatgggatgcagttctaagagggaagtttatagccataaatacctatatcaaaaaagaagaaagatctcaaataaacaatgtaacatcatacctcaaggtactagaaaaagaaacacacacaaagcccaaagttagtagaaggaagaaaataataaagatcagagcagaaacaaataaaatagggactagaaaaataataaaaaagatcagtgaaactaagagttgggttcttgaaaagacaaacataattgacaaacctttagctaggctaagaaaaaaagagagaagattaaaataagtaaaaccagaaatgaaagaggaataattacaatcaatagcacagaaatacaaaggattataagatattataaataattacatgccagcaaaagggggaacctagaagaaatggataaattcctagaaacatacaacttaccaggactgaatcatgaagaaatagaaaatctgaacagaccaataacaaataagaagattgaatcagtaatcaaaaatctcccaccaaagaaaagcccaggacctgatggcttcacaggtgaattctaccaaacatttgaggaactaataccaatccatctcaaactcttccaaaaaattgaagagagggaatacttccaaactcattttacaaagccagttttactgataccaaagccagacaagaacactgcaaaaaaagaaaattatggaccaacatccttgatgaacacagatgcaaaaatctcaacaaaatataagcaaactgaactcaacagcacattaaaaagatccttcaccatgatgaaatgagattttcccttgggatgcaaggatgattccacatatgcaaatcaataaatgtgatataacacattaacagaataaaagataaaaaccatatcattatctcaataggtacagaaaaagcattagacaaaattaaacattgcttcaggataaaaatctcaacaaactaggtacagaaagaatgtatctgaacacaatcaaggtcatatatcacaagtccacagcgagtgttctacttaatggtaaaaagttgaaagttttttctctaagatcaggaaaaacacaaggatgcctgctcttgccacttctattcaacacaatactgagttccagccagagcaagtaggcaagggaaaaaaaaaaaaaaaagccatccaaattggaaaggaagaagttaaactgtctttgttagcaggtgacatgatcttatatatggaagatcctaaagactccattaaaaaaactgttagaacacattaatttagtaaagttgcaggttaggcgctttgtaatacaggctgggcgcagtggctcacacctgtaatcccagcactttgggaggtggaggtgggtggatcacctgaggtcaggagttcgagaccaaactggccaacatggtgaaaccccgtctctactaaaaatacaaaaaattagctgggcgtggtggcgcatgcctataataccagctactcaggaggctgaggcaggaatttcttgaacctgggaggtggaggttgcagtgagccgaaattgtgccactgcactccagcttgggcaatgagagtgaaactccgtctcaaaaaaaaaaaaaaaaaagaaaagaaagaaagtcaacatacaaaaattagtagtagcatttctacatactaacaataaactatctcaaaaaggaatcaagaaaataactaatttacaatagctacaaaataaaaatacttaggaataaatgtgataaggaagtgaaagatctgtatattgaaaactataaattgctgatgaaagaaattgaagaatacacaaatagatggaaaaatatctggtgttcatagtttagaagagttaatattgtttaaatatccatactacccaaagatttctacaggtccaatgcaatcactataaaaatcccaatgaaattttcacagaaacagaaaaaacaatactaaaatttgtacggaaccataaaagaccccaaatagccaaagcaatcttgagccaaaagaacaaagctggaggcatcatactacctgacttcaaaatacactacaaaactatggtaaccaaaacagcatggtactgggataaaaacagacacataggccaatggagcaaaataaaaagcccagacataaatcgatgcatttacggtcaattgatttctggcaaagatgccaagaacatacaatggggaaaacaatctcttcaataaatggtgttggggaaactggatagccatatgaagaataatgaaattagacccttacttcacgtataaaaaacaaacaaacaaaaaatggattaaaaatgtgaaactgtgaaactgggccaggcgtggtggctcatgcctgtaatcccagcactttgggaggccgagtcaggtggatcacctgaggtcaggagttcgagaccagcctagccaacatagtgaaaccccatatctactaaaaatacaaaaaaattagccaggcatagtggcacacacctgtagtcccagctacttgggaggctgaggcaggagaattgcttgaacccaggaggtggaggttgcagtgagtaaagatagtgccactgcactccagcctgggagacagagtgagactctgtctaaaaaaaaaaaaggatgtgaaactgtaaaactactagaagaaaacatagggtaaaagctccatgacattgatctggacaatgatattttggatattacctcaaaagaggattcaacttccttcttttaggtatggatatccagtcgttctaccaccattttgtttttaaaggctattctttccaccattgaattgtcttagcactcttgtcgaaaatcaattgactcttatactgaaggaaagcttgggggtggcggggggggacatcaattcaccatgaattcatgagtttacttttgagctcccaattctattacacatgatatgatgtatccacatagtcctcataagtgtagctttgtagtaagttttgaaattagaaagtgagtcctccgattttgttgttctttttcaagaattgttttcattattttgggttttttgctattccttatgaattttggtatcagcttgtcagtttccacaaaaatatttgctggatattgacagagactgtgttgatattgacagggattacatgggcttcctctgaagtttctattgattgctttttttttttcttgagacagagcctcactctgtcacacaggctagagtacaatggtgcgacctcggcagactgcaacctctgcctcccaggttcaagcgattctcccatctcagcctcctgagtagctgggattacaggcacccgccatcatgcccagctaatttttgtattttagtagagatgacgtttcaccatgttggctaggctggtcttgaactcctgacctcaggtgattcactcacctctgcctcccaaagcactgggattataggtgtgagccactggacccggctgattgctccttttttctatgtatgggcaatacttcatttccttgcatgtctcataattttttgttgaaaaccagcctcttaaaataacatattatgtcaactctgaaaatcaaattctctcccttccccaggatttgttgatgttgctatttattgttattgctacttgttgtcgtcgtttctttgtgacttttctgaataaattccataaaatctgcatttcttataatgtgtggccactgaagtctctgctctgttagcttagtggtcagctaattattagaaagacattttcttaaattcttgttatcagcaactctcccagtctttgccagggagctttgtgcgtatgttggagcatgccttcaatactgaaccaggcagctgacaaatctgccttcgtctttacttccttcttgcatagagcttcaaggtgacccagagatgaaagaacctcactggttcatcataagcctgtgcatagctttaggtgagtgctttccaaagatcctatggcttttcatggcatttcattccccaacttttccttttcagctttttggttagcctattgcttgtcccaactgttacctactgcctcaagcaggcataaaattaagcaattgctcctaattgttttgacaaatgcccccaaggaaaaggcttttaacactaaacaaacttccagtcatggcaagcaaaccagatgggtaaaataatgataattcctgagaaggaggctttgaaagagcttcaacctcatttcattctctctggtaactacaagctctggttttcactttgattgcctgctattggttttcaaggctgccagaaaactggagaaagggaaatagaaataggggaagttaagataccacaaagctcactattcttatcaagattcagccatttttcttaaatacatgctttcctaatggctgcaaacctttggttaattttcagagttctaaaattgttgattttgttgcagtgagctgagatagcaccactgtactccagcctgggcaagagcaagacttcgtttcaaaaaaaaaaaaaaaaaaattgttgattttgactattttgtcagttttctcattgctcttctggagaagagaatttttagaggttcttactcagaaattgtcactaacgttactccagtaaacttttaaagtaagtgcctggaagtcaatattttaggctttgtgggcaaactcaaggatgttaaacaggcaattatataacaagagagggaaaaaaattttcacaaaattttaactgatgaaattcaaaatatgataataagtacttttttgttttatagctctactaatgagaagaatgaagctctttggggggaggtaacattttacttaattgggggttatcatcataaccaattgcaaattttcatctatcagtgctgacctgtaaagagattttgcgtatttcatctttgaaaatgtcttttcacaaagataggtactgccaattctgatatcagtccacaagcatgtgattttaattgaatttaattgtgattgaattgaattcagttgtgatttaaatgtaatttatattcatcacatgtaaggcatttacagaattctattagattttttccttgatatttgccttttagcatgtattaatcactcatttcattatgtattaatcacttcgaattaaaggttatttggaaactcttctattgcacagttaaatagactttgaagcatgtaagtttcctttcagcatacatcacattctaagaaacactgcttactctgtagcttgaattccaaaaacaattccacaggaaatttgtatggaaatggagatcttcctttttgtttcaacttttgacagcatgggaagtatttaaagtgacacaacatcagctgtgacccaaacaatattagtaaaggcaaaatgactttaccacaatataagttttgcatataagcactgttttgccttttaatattagcttgaatttattaagaaatactttcaaattcacagcaaattctaagcattattatactacggtataatagtggttgacagaggctattcttgttcagaaaaacttaactgttggtcctgagctcaaaatatctcaataaaacttcactaccaatgagccttcaaatttctgtgtggtagaacaagtcaaggtatttatcatctacttctgataaaaattcatgatgattaagtccacaagagttaagttcagtgttaacagtactcattcaataacacataattcaaatattttcctcaaaatatcgatatataatacaatgaatttcataggctttaaacctcttacatttctgcacgctttatagagttgtccagctaagcctcttgctgctccacacatatttttactatcatcagttgtaacacaccttaatagattccatttctgattgtaatgaattaatattttttcaacttctttaaaaatattctcccctggccgggcgcgctggctcacgcctgtaatcccagcactttgggaggccgaggcaggtggatcatgaggtcaggagattgagaccatcctggctaacacggtgaaaccccatctctactaaaaatacaaaaaaaaaaaaattagctgggcatggtggcgggcacctgtagtcccagctacttgggaggctgaggcaggagaatggcgtgaacccgggaggcagagcttgcagtgagctgagatagcaccactgcagtccagcctgggcaaaagagcaagactccatctcaaaaaaaaaaaaaaaaaaaaaattctcccctatagctgttacatgtataaaagctactcctccagtcacttaaaattgggcattgacttctcaagatttttaaaaactgcctgttggccaggcacggtggctcacacctgtaatcacagcactttgggaggctgaggcaggtggatcacctgaggtcaggagtttgagaccagcaggaccaatatagtgaaaccccttctctactaaaaatacaaaaattagctgggtgtggcggtgcgtgcctgtagtcccagatactcgggagggtgaggcagaagaatcgcttgaacccaggaggcagaggttgcagtgagccaagattgcgccactgcactccagcctgggcaacagagaaagattccatctcaaaaaaaaccccaaaacaaaacaaaacaaaacaaaacaaaaaaacaaaaaaaaacctcgcaaaaattagccaggtgtggtggtgtgcacctgtagtcgcagctactcaggaggctaagacaggagaatcgcttgaacccaggaggcaaagattgcagtgagccaagatcacgctgctgcactccagcctgggtaacagagcgagattacatctcaaaaaacaaaacaaaacaaacaaacaaaaaaactccctgttttttagtggactattgatgctactcccaatgtcccaaactcttcaaccaactatcctcaatgcaaggctaatattcttaaacaagtttgctttttctgggtacatttattcagccattgtaatcaaacatcatgtaattaacttaccatttataaacagatttctttcttggttaacaaacgaactacttgataatttactttagttatggattctttgtcatttttaatttctgtgaagaaattctgccatgatctctgcaatgttgatgcatttcatcctcttctagaagagctagcacgtcatcgcacaagatacaatgttttgtcatgtgatgtgacagaaaataattcacaccccattatgccttagaaacagacattcaaagtctacttttatcttctttctttttttaacatgaaagatatgtactcataatttttttaaagttagagtgtggcaatatatgtagcactcaaaatcctgttgttttttaactgtgtaactgcaattctcattgtgccaagtggcagtttaaggcaatgagaatgctacatccagcccctggcacaattcctcactttcgccagtgcagcacaaaagcacccatggaaaaaagtaaacaaattagcatggctgtgtccccataaaagcttatttatggatattacaacttgaatttcatatcacttcatgtgctacaaaatattctttttttgattgtttaactatttaaaaatgtaaaaactattcttaactcacgggccatacagaaacaggtggcaggccagatttggtacacaggctatagttagccaatccctgctataatacatttaacttaattttttgttgttgttgttgtggagacagagtctcattctgttgcccaggctggagtgcagtggcatgatctcccctcactgcaacctccacctcctaggttcaagcaattctcttgcctcagcctcccaagtagctgggattacaggtgcatgccaccatgcccagctaatttttgtatttttagtagagacagggttttgccatgttggccaggctggtcttgaactcctgaccccaggtgatccacccaccttagcctcccaaaatgctgggattacaggtgtgagctgccgtgtccggccaaatttaaagttcatattaatttaattatttgtataggtaatacttgcacatgctctaaacttaatatcttagagaagggtgggtggcataaaatctcccctctacatcagccaccagctacccagttcctctccctagaggcaaccagtgttgccagtttcccatgtaagcttccagagccactctgtgtatatctaagcaattacacacagatatatttttctttcttgtgtttacataaaaggcaacatactctacttcatactcactcacatggctataatcaaagatagctacactggcaaggaaatggagaaattgaaacctccgtagactgctggaaggaatgtaaaacagtgcagccgcttgccgtatcagccagcacttctcccccaggtgtatacccaggagaaaggaaaacacaaattcacacaaaaacttgtactccagcgtttatgttattcataatagcccaaagtggaaacaatccaaatgtctatccactggttaacaaactgtgttaaaaatgtatacaatagaatactactcagccaaaaagatgaaatactgatacatgccacaacacactaagccttgaaagcaccatgctaagcgaaagaagctggacccaaaagtcaatgcattgtatgatttcatctatgtgaaatgcctagaagaggcaaattcatagagacagaaaacagattgctggaggaagaaaaaatgggaagtgacagctaatgagaacaggattttttttttttttggagtgataagaatgttctggaactggataatggtgatggttgtacaaccttgtgcatatactacaagcactgaattgtgtacttaaaaaatgtattctataatatgtgaattacttctcaataaaattagtagcatattatacatatgccttgcctttttcccttatcatcatctagaggccaattaaaaggggacgagacatgcaatatgaaatacagtggtggcttctgtgagcactggccaaattaaaaatgatagtaacccaaatctaaaaatgcttgcctcaaaaaagggaatattggctgggcaaggtggctcacgtctataatcccagcactttgggaggccaatgtaggtggatcacttgaggtcaggagtttgagaccagcctggccaacatggtgaaaccccgtctctactaaaaatacaaaatttagccaggtgtggtggcaggtgcctgtaatcccagctactcgggaggctgaggctggacaatcacttgaacctgggaggcagaggttgcctgagattgcgccactgcactttagcctgggcaacagagtgaaactgtgtatccaaaaaaaaaaaagggaaagaaaaagaaaaaaaaaaggggatattcaagtctttctacaactaagtttttaaaaactctgtaactggttataagtaggctgaaaactgaacccatccgagactgaacctgcagcttgtatattaacacagttgaattcacagtctacagtacttttttcttttttttttttttttctgagacggagtctcgctctgtcacccaggctggagtgcagtggcgcaatctcagctcactgcaacctctgctgcctgggttcacgtgattctcctgtctcagcctcccgagtagttgggattacaggtgcccgccaccaggcctggctaatttttgtatttttagtagagacggggtttcaccatcttggtcaggctggtctcgaactcctggcctcatgatccaaccgcctcggcctcccaaagtgctgggattacaggcatgggccaccatgcctggcctacagtacttttaaccaaaagtgagggcaatggttgagaaagaaagaaagcccgacaagatggaactggaataaaaatatccagaaatattccgagactcccccggtcctaccactctacaacactccactgtgcctctcctcccttaggaagagtcctcgccctttgagggaaaataaccacgctctcatgccctgctactacacatttttacctggctggtaaccagaattgaaactcaaccaggcctgggagtgaaatgcattattatggaaggagaatgaagaattgcttcttgaaggaagagcatggctgcaccaatatgtatagtcatactgtaaataaaaacaaaaacaaagcaaacaaaagatatgtatagtcatcatgagaagggacttaaggtccccaggcatagagggtggcgtttatttctcacctggaatgaagttattgatttaggtgcattctttcagggggtgtgggcagctgctttagcagtttgctgctttggctaatgttctgaatgctgctctgtgcaaaatgacatggcaaagccagagacactttggcataagacagagaaagaattcaaagacttcaggagacaggaatgccgcactggaactgcagtgggtttcccccttaccagctcctcccgcctccatgtggctcccgtgagggctggaaggctctccactcaccttggccttgagaaacggattggtgaggaatatggcagtctttcaaatgggctttcactggctgttctcctggcctggggatattggtggtacaggctggagttgccttgctgatctcaatgggaatgagaggagccggcgttggcttggtccacgtggccacagttacctgccagaagccaaggaggccgggtaatcataataggcaacaaggcaggtgtgcttattaggttcacaacatggttggtgcaaggcccagagatctttagttgtggttaattagagggttcccaggaattatagtgacaggtgctccatccttttgtatgcaaccataaaataaaaatagaataaaatagacggggctcggtggctcacacctgtaatcccagcactttgggtggccgaggcgggcggatcacctgaggtcaggagttcgagaccagcctggccaacatggtaaagccctgtctctactaaaaatacaaaaagtagccgggcgtggtggcaggagcctgtagtcccagttactcaggaggctgaggcagaagaatcgcttgaacttgggaggcagaggttgcagtgagctgagatcgtgccactgcactccaacctgagtgacagagtgagactctgtctcaaaaaaaaaaaaaaaaaaaaaagaataaaataagtccaggtctaatgaaaatcaagacataaggaagtcaagaactggtatctaattctgtacgctgggtcacttcattgatccagagtctctcgtctagagaccggagaccataagtaacatggtctaggtagccttgagacccacataatcaccaaggcaacctggaaggcttcttcctcacatttccccaaagagaaatgtgccctgggagaaagaacataccaaaacctttggtctactggatactggatcaaatctaagtaatgcgaattattgggatcctaggaacctcgacatcaccatggtctgccctttggagtgaggtctatgtggatccagagatggagtggggatcgagtccaccaatagcaagcccaccccgagggtcttttctgtccagatgtagatagatagatggatctcctcagaatcaggcatcatcacctattggcttgttaaggcctggagtaaatgccaccatggtgggcagggccaaaaacgagacactggaacttcctctttcctccaaaatagcaaccaaaagcattgttacctctaaaaaatgttttaagtacacatttcagtggttgtagtatattgtagatagtcccaaacatcaaacacttggaaagggtgtgcttggtgacccctgtgacatccccactgaatctgcaattcagctgctgcacagggtgccagttgaattagccttagcttaatcaggtggttttccaagtgtcgatcccaacccaactcccattttcctctcactaggaaaaatcaatacaatgcctggaaactgttatgcactttttttttttttgagacggagtctctctctgtcacccaggctggagtgcagttgagtgaccccagctcactgcaacctccgcctcccaggttcaagcgattctcctgtcccagcctcccgagtagctggaattacaggcgtgcaccaccatgcccggctagtttttgtatttttagtgagacagggtttcaccatgttggccaggctggtctcgaactcctaacctccagtgatccgcctgccttggcctcccaaagtgctgggattacaagcatgaaccactgcacttagcctggtatgcactttttttttttttttgagacagagtctttccctgttgcccagactggaatgtagttgcgtgatcctggctcactgcaacctctgcctcctgggttcaagcgatcctcagcctcctgagtagatgggactacaggcatgtgccaccacacccagctaatttttgtatttttagtaaagatggggttctgccatgttggccaggctggtcttgaactcctggcctcaagtgatcctcccactttggcctcccaaaatgctgggattacagtcatgagccaccgtgcctggccctggtatatacacttttgattgtgcaaacgcatttttctccatcatgaaagagaaaataccagatgatgtttccttttactcctttacagttcttctcagattcctctctccttttggaacatacattgttcccagtgaaatggaacattgcacgtaacagctaattggtctattacattaaaagcaacacgttgatagactaggaaaaaaagaggaacagttatcttgaagatacatatatattatatatccatataatatacggttggtacaaaagtaattgcagtttttgcattgttgaaatttgccgttggatattggaataccttcttcttttaacaacataatgggtttatatttaatatagtacttatcaggagggtgttgctaagttaatgtaaagtttttttcttaacattaaatctcttttccatgtcaacgtctatagttttttttaacattaatttttttctgcatttcagtattagatacactgaatacatttttcgaaatgttttttctccagagaaaaaagtttccctttttggctgactctcttatatctaaatacaatattaacttgggagacaacaaaacaaaaatctaataaaaagatggagaaaactccccaacgattcgggaggcagtgattataaccgaacattggtgatttcctaagattctgggcaagaacttccttcttcctatttcacattctttgagaattctaaaactatgaaatattacttatgtaaatttcagctatcttacttctttgacctcctttctaactagcaaatacaaatgataggctgcatttttctgtgcattatttgttgtaaagaaaacatatttttttcaattcatatatgtatgtctgttcccatttcatggaaacaacgaaaaatgtaaaactcccttatttactgattcttggaaactttcagaccccaaagctcaggtttagcctctatagcacaaaggttttcagggtgaggtttgactcagtaggcctttcacactcacatctgtccatttctttttcgtgcatatactcccgagcagcacaaatgcctgtaatgctgagaaccacacctaacaagagggcgactgcatcaccggcttctactgcttccacaacaggcagcaccaaaagcagtgacatgaggactaaggacaactgtgttgaaactgaggtcatgatgttggaatcttgagggctgaaggttccaaagaaatggtgtatatagaattctatctgacttgaaattttcccttcctggagctccggatgctgagattaagaggttccacgtgacactaccttccaggaagcagccattacaggactgcaatacattcttaaatgtggttatgtcatacatcatcttaatgagcatttctctctgtacttatttatttttgctaatgacttattacttgctgtttatttttttctttattttagactatggaaatgatgttagacaaaaagcaaatttgagcaatattcttattcgagttcaaaatggattgtaaagcagtggagacaactcgcaacatcaatggcccaggaactgctaatgaacataccgtgcagtgggggttcaagaagttttgcaaaagagaggagagccttgaagatgaggagcgtagcggccagtcgtcggaagttgacaaccaccaactgagagcaatcacggaagctggtcctcttacaactacaccagaagctgctgaagaactcaacgtccacctttctacggtcattcggcatttgacgcaaactggaaaggtgaaaaagctcgataagtgggtgcctcatgagctgagcgaaaatcagaaacattgtcgttttgaaatgtcgtcttctcttattctacacaacaacaatgaaccatttctccatcggattgtgatgtgcgacaaaaagtggattttatacgacaaccagcgatgaccacctcggtgggtggactgagaagctccaaagcacttcccaaagccaaacttgcaccaaaaaaaggtcctggtcactgtctggtggcctgctgacggtctgaccaccacagctttctgaatcccggcaaaaccattacatctgagaattgtgctcagcaaatcgatgagatgcaccaaaaactgcaaagcctgcagccggcactggtcaacagaaaggacccaattcttctccaggataatgctgaccgcaggtcctacaaccaatgcttcaaaagttgatcaaattgggctacaaagttttgcctcgtctgccatattcacctgacttctcaccaacaaactactgcttcttcaaccatcttgacaactttttccagagaaaacgcttccacaaccagcagcatgcagaaaatgctttccaagagtttgtcgaatcccgacgcacagatttttacattacaggaataaacaaacttatttctctttggtaaaaatgtgttgattgtaatggttcctattttgattaataaagatgtgtttgagcctagttataattttaaaatcacagtccaaaaccgtaattactattgcaccaaccagaatatatagaatatataacataatatatatttgaaatatactatataaatattatatattatatatttcatatatattatatatttcatatataatatatatatttaatatataatataatacatattttatatatattatatattatactctatatataatatagatcatatatattccacatattatatatattatactccatatataatatatatatttcattcatcatatatatttcatatatagtatatttaggcagggtcttgctctgttgcccagggtagaatgcagtgacacaatcactgcagcctcaacctcccaggcacaggcgatcctctcacctcagcctcctgagtagctgggactacaggcacgtaccatcacacttggctaatttaaaattttttgtacagacaggatctcactatgttgcccagaccggtctcaaactccgggacccaagcaatcctcttgtcccagcatcccaaagtgctgagattataggcttgagccatcacacccaacagagggtactttttctggctgttctgcaccacagcctccttggatgggtaggagtgtgttcatttatcatctagcacacaggctgctgaaacaagaggaataatgttcaaacatgatcaaaaggagtatgcatctcacacagtgaagctgggcttggagctatgttttaactgaatgtgactgaacatggtcttaatttgtaaaagaagggaggttttgagttatttaaaagacgcatacgggaaaaattttcaacttcatacacgctgggattatgaacatgtgtctgtgcacaggtgtaggtgtgcatgagcctttgaaaatcaaagcataggccaggaacagtggctcacacctgcaatcccagcactttgggaggccaaggctggtggatagcttcagtccaggagtttgcttaagtcagggagtttgagaccagcctgggcaacatggggaaactccatctccataaaataaataaataattttttaaagttaaaattaaaaatcaaaaaaaaaagaaaatcaaacggtggactgcagtgaacattttattgtttttgtctagtcagcagcccagatgcctttggaaaaaagttaccctcaactctagccatgcaatacagaagagggcgccaatcagatcaccctggacttgtggccacaggattgggcaaacaatccaggctgataacagttttttgtttgtttgtttgttgttattgtttgttttgtttgtttttgagacgcagtctcactctgtcacccaggctggagtgcaatggcgcaatctcggctcactgcaccctctgtctcctctgcctcctgggttcaagctattctcctgccccagcctctcaagtagctggggttacaggcatgtgccaccatgcccagctaattgttgtattttaagtagagactgggttttaccatgttggcctggctggtctcgaactcctgacctcaggtgatccacctgccttggcctcccataagtaccgggattacaggcgtgaaccaccgtgcccagcctgataataggttcttattggtagaaacattttaaatgacaagacatagaatacctaacaaaaatgtcttatgaatgaaagaaatataagtggcatttataaaacactcctcacaacaaaaacagaacacactttttttttcaaatgcttgtagtacatatgccagagtagtttacattctaggaaataaagcaaacctcaacaatttttaaagaattgcaattaaatagagtatgttatctgaacacaaaggaattaaaaactaaaaaccaataacaaaaagaagtctggattatcctgaaatatttggaaattaacacacttcaaataacccatgagtcaaagtcaaaagggcaattaaagatattttgcattgaattaaaacgaacaaacaacttatcaaaagtataggatgcaattaaagcagtgcttagaggaaaactaatagcatatatatatatatgctatcaaatcaatgacctaagctaccaccttaagaaactataaaaagaagagtaaactaaacccaaagcaagtagaaataagcaaataataaagagaaaagcagaaactcatgaaagtgaaaacaaaaataataaagaaaatcaaacataaaactggttcctcagaaacaggaacaaaatttataagcctctagcctgaccaagaaaaagaagaaaacagatcactaatgtcaagaatgaaaaatattacactgtagatcttagacattaaaaggataaaggaatatttaatacaatattatgcctataaatttgataaattagatgaaatgggcaaattccttggaaaatgcaaactccctaagcttactaaagagaaaataaataacttacatattcccgtatatatcaaagaaattgaatttgtcatttaaaatatttcactagcctggccaacatggtgaaaccccacctctactaaaaatacaaaaattagctgggcgtgatggcaggtgcctgtaatcccaactactcgggatgctgaggcaggagaatcatttgaacctgagaggtggacgttgcagtgagcggagatcacaccactgcactccagcctcggggacagggcaagactccgtctcaaaaaaaaaaaattttttttcaacaaaaacactccaggcctagatggcttcagtggtgaattccactaaacatttagggaagaaataatacaatttcccacagattcttccagataattgaaaagaagaaatgtttgccaactaattttatgaggccattacaccaatacccaaaccagaaataaacactgcaagaaaaaaaatcctttagaccattatccctcataaacataggtaacaaaaatcctcaacaaaatactggcaaactgtgttcagcaacatataaaaagaataatgcatcatgacaaagtgggggagttatcccggaaatgcaaaattggttcaacatttaagaatcaatgaatgtaattcaattgacccaagaagaaaaactatataaacttctcaatagaagaaaaaaaagataattgaacaaaattcagcatcaattcattataaaaactctccaaaactaggaacagaagggaactttcacaatcaaacaaagggcaattacacaaaacctacaactaatgtcatacttcatgattaaagactgaaaactttctcctaaaatcaagaacaatgcaatgatgttcactctcaccatttatatttaacatcatactgaaggccctagccagtggaataaagcaagaacaagaaaaaaaaaaagcaatatagattagtgataaagaaataaaactcttgattcaaaggtgacatgattgtatatgtagaaaatacaaaagattctattttaaaatctcccagaactagtaaaggcatttggcaaggtcacagtatgcaaggtcagttcaattaattgaatgtctatagactagccataaataattacaaaaatgaaaaaattttaagtaccatttataagaacactgaaaataatgaaatatgtaggctaaaatctgacaaaatatgtgcaagatcagcatactgagaagtaccaaacactgatgaaagaaagaaaataggatctaaataaatggtgagatgatccatatttttgaattggcagattcaatattattaagatataaattccatcaaaataacctataagttcagtgcaatcccaaacaaaatcctagaattttgtagaagtaaacaacctgattttaaaatttgtatgtaaaggcaagggaactagaagtgccaaaataacagaacaaagttgaaagactcaaaatacctgatgatttcaagagttacttcaaagtcacaataatcaatacagtttgttattgctgaaaggatggatacatagatcaatgtatacatagattaatggaatagaatagaatccaaagaaagatccacacctatatggccaattgatttttgacaaagagatgaaggcaattcaatggagaaatgatcgtctttttgacaaatgatgctggaataattggatatccatatgaaaaaataggaaagttgacccagatgttacaccatactcaaaaatcaactcaaaatgaatcattggtgtaaacataaaagccaaaactacagaacttctaggagaaaatgtatgtcactatgggttaggccaagatttctaagataacatcaaaacacaatccataaaagaaaaatatgaataaattggacttcattaaaattttgaacctctgctctttgaaagttactgctaaagaaaatgaaaaaaggaaccacagacttggagaaaatatttgcaaagtgtgtgtatggtaaaagacttatatccagaatatataaagatctctcaaattcagtatcacaaattgtcaggcaaatgaaaattagaaccatgatgagataccactttactcctgcaagaacagccataattttttaaaaaaatagatgtggtatggtatggatgtggtgaaaagggaacacttctacactgctggtgggaatgcaaactagtacaaccactatggaaaacagtatggagattccttaaagaacaaaaggagaactaccatttgacccagcaatcccactactgggtatctacccagaggaaaagaagtcattgtatgaaaaagacacggccgggcgcagtgactcacgcctgtaatcccagcactttgggaggtcaaggcgggtggatcacttgaggtcaggagttcaagaccagcctggccaacattgtgaaacccagtctctactaaaaatacaaaaattagccgggcgtagtggcaggtttctgtaatccccgctactcagaaggctgaggcaggagaatctctggaacccaggaggcggaggttgcagtgagccaagatcacaccattgcactccagcctagttgacagaacaggactctgtctcaaaaagaaaaaatagaaaaagacacttgcacaggcatgtttctagcagcacaattcataattgcaaaaatatggaaccagcctaaatgcccatcaaccaacaaagtggataaggaaaatgtgatacacacacacacacacacacacacacacacacacacacgcataccatggaatactactcagccataaaaaggattgaaataatggcattcacagcaacctggatggaattggagaccattattctaagtgaggtaactcaggaatggaaaatcaaatatcgtatgttctcacttgtaagtgggagctaagctatgagaacacaaaggcataagaatgatacaatggatgtcagagactaggggcgggtgagggataaaagactatacattgggtacagtgtatactgctcaggtgatgggtacaccaaatctcagaagtcaccactaaagaacttatctatgtaaccaaaaaccacccgttccccaaaaactattgaaataaaatttaaaaaatgagaacaaacaagcaaagacctcaatacaaaaatgggcaaaatgtttgaacaaggatttgaatttaaaaaaacagcaaatatgcacataaaatgatgctccatggctcagttttgttactctgtgcaaaaaaaaaaaaaaaaaagaaaaaagaaaagaaaagaaaaaaagcttctcaatggcattagtcattagggaattgcaaattaaagccacagtatgatacagctattgcaaagacaaaactaaaaagcaaaaaaaatcgagaaaaaacctgacaatatcaaagatgacaaggatgtagggcagctggaactttcatttgctgctggcggggatgcacaatgatacatccacttgaaaaaacaatctggggccagtgcagtggctcacaccactataatcctagcattttggggcgtggaggcaggaggatcacttgagtccaggagttcaagaccagtctggacaacatagtacaacctagtgtgaccctatctctatttttaaaaaattaaaaataaacaagcattttggcggttcctataaagttaaacctatattttccatatgactcaaaaaaccgaattctagatattcaagaggaatgaaattcaattcaagaggaatgaaagcttatgttcacacatcagtgtttctgtctcaaaaaaaaaaaaaaaaagatgttacataactcctactggaaccacacgacactacacaggaaatagtttagccttaaaaaattaaatctattagccaggcgtggtggtatgtgcctttagttccagctactcatgggagtttgaggtgggaagatcacttgagcccaggagatggaggttacagtgagctatgatagtgccactgcactccagcctgggcaacagaattagatcctatcttaaaagaaacaaaaattctgaatctgaccgagtttctagatcaacatagtgatttcaaggaaatacaagggacaaaagaacatgttaaaacacaccatgggagctaatacaaacacgcatacgtatgcatgtttgtacgcatgtacgtgtatacgtctatacattattttatagacagtcatgtggtgcttaacgatggggatgtatactgagaaacatgtcattacgcaatttcatcattgtgcaaacatcctagagtgtacttatgcaaccatagatggtatagcctactacatacctaggctgcaaacctgtagggcatgttactgtaatgaacactgtgggcacaatggtaagtatctgtgtatttaaacatagaaaagatacagtaaaaatacagtataaatgattataaaaaatagtacagctgtgtagggtacttaccatgaaaggagtttgcaggactggaggttgctctggctgagtcagtgagagggtggtgagtgaatgtgaaggtctaggacgtcactgttcactactgtagactttatccacactgtacacataggatacactaccttcattttataacatttttttcttcaataataaattaatcttagaatactgtaacttttttgctttataaactttaaaattttttaactttttttttttttgagacagtcttgctttgtcatccaggctaaggtgcagtggtgtgatctcggctcactgcaatctctgcctcccaggttcaagcgattctcctgcctcagcctcctgagtagctgggattacaggtgcctgccaccatgcctgggtaatgttttgtatttttagtagagatggggcttcaccatgttggccaggctggtcttgaactcctgacttcaggtggttcaccctccttgacgtcacaaagtgttgagattttacaggcgtgagccaccatgccgggacttttgtttagctttttgactcttttgtaataacacttagcttaaaacacaaacacatcgtacagccatacaaaatattttccttctttatatctttatttgataagcattcttctcttttaaattttttttaacttcttaaacttttttgttaaaaactaagacacacttacaaataaagtaaaaactaagactcaaacatacacattagtctaggcctacgcagggtcagaatcatgaaagtcactgtcttccacctccatgtcttgtctcactggaaggtctttggggacaataacaggtatggagctggcatctcctatgataacaatgccttcttctggaatatcttcagaagaacctgcctggggctgttttgcagttaactttgctttttttcatcagtagaaggaatacactctaaaacaatgataaaaaaatatatagtataggccatcatggtggctcatgccagtaatcccagcactttgggaggctgaggtgcatggattatctgaggtcaggagttcaagaccagcctggccaacacggtgaaacttcatctttactaaaaatacacacacgcacaaaattagctgagcatggtggcgggcacctgtaatcccagctacttgggaggctgaggcaggagaattgctcgaacccggaaggtggaggttgcagtgagctgagatggtaccactgcactccagcctgaacaagagcgaaactccatctcaaataaataaataaataaataaataaaacttttaaaaagcatagtatagtaaatacataaaccagcaacattgttttttattatgattaagtattatatattgtatatgctatagtttgatatgggtggtagttcagtaggtttgtttatgccagcatcactacaaattcgtggggaatgccttgtgctacaactttctgacagccatgaggtcactaggcaagaggaatttttcagctccattataatcttatggactgtcatctatgcagtccacccatgaccaaaatgtcatgtggcacatgactgtagtgtgcatatatatttattttctaattaaatgtgtgtgagttcagatactgaaagagctctgtatcaatgagcaggcctagtggtcatatcttagttcctaaatgctgttcgcccccaaacaaatcagggctcctacagcatatacaagatttgataatgatagtaaacaacaatgttcctggttttatgattataccagagggctggttcggggagcctggagcactttcttgtaccagaaagtaaggaagttctaaagaagatggagacatatttagatgacacagaaactggcttgaaagtcttcccacttgggataatttcaatataaaaaaatggataattataaaaataataatatgaggctggggatagtggctcacgcttgtaatcccagcactttaggaggccaaggcagctggatcacctgaggtcaggagttcaagatcaccctggcaaacatggtgaaaccccatctctactaaaaacacaaaaattagccgggtgtcgtggtgtgcacctgcagtcccagctactcgggaggctgaagcaggagaattgcttgaacctgggaggccaaggttgcagcgagctgagattacactgctatactccagcctgggcaacagagtgagactccgtttcaaaaataataataataataataataataataataataataactcctcactggtataaacagacaagggagaagggagatcttgacaatagaaagccagtgacaacatatagaagagaagatgatgaaattagaaaattatcttatggccctcgtaataattaattgagggaagatgtattgatgcatgctaaaaccagtgaatgaggtcaggacagaggggcaaaccctcccgtacgtaacaaaagtaaaaactggataaaacaacaacaaaaaaaccccactatttaaagacacggaaaatgtccaaaaccaggcagaaactggaggaaagtttaatataaaacacaactggaagtggcaaaacctgtacatttgtaactttctgacctgagcttattccccaatccccacagctactagctgtggaaatctgcggtgaaaccacagcctcagtgtttcaaggaattatcaatcagagtgcaagcggagaaacgcagctgggatttttttttttaattaattaatttttttttttttttgagaccgaatcttgctgtcgcccaggccagagtacagtggcatgatcttggcttactgcaacctctgtctcctggcttcaagcagttctcctgtctcagcctcgcaagtagctgagattacaggcacatgccaccatgcctggctaatttttgtatttttagtggagacaaattttcaccatattggtcaggctggtcttgaactcctgacctcaggtgatccacccaccttggcttcccaaagtgctgggattacaggtatgagttactgtgcccagcccgtggctgggaattttaacaggaaatactgccattgaaagactcactgaaggagcgaaacaaattctgaatgtaaactttgcccgattccctggctggaaaacaagccacacaggggaaacttctcagggtcctggtgaaaaaggaggcagagaccaaggagaaatctctcgaacgataagctatgtaggaggtgagatctgtgagtctgctttctgtttcttgttccttctgagtccattccccaaccatacacagactgaatgaacaagcacgaaagtcttacaggaacgcaattatcttaagacagacccgaaagcccgcagagcagctggaattaggcaggaacctgcacaaacaagaagccacagagatgctgagttcatcaccaagttaagcagggacaaggctgatcacaaagttaagcagggacaagggagacccccatggcccaggctgaaaaagcagcagtgagaaacttgcataggacagaggtctcaggtgctgaacactacaggggaaaaaaaacttggtagtttggatccaggcaagttaattgcctattagaatgacaacaagacaacgtccctcagaagaacacaccaaaatccagagtccacattgtattacttacactgtccaattttcaacccaaaattatcaaacatgcccccccaagaccccgaaaacaaaacagaacaacaacaaccaaaaaatacccagaaaacaagacagtcaataaaaaccgaatctgactgaactcaggtgttggatttagcagacaaaggcttccaagaggatagaaagatgttcaaataattaaaggaaaatatggtataaatgaataagccgatataaaattacaatagaaaaatggaagctatttggggggacattctagagctctgaagtataataaatgaaattaaaattttactagatgggctcaaaaccatatttgagatggcagaggaaagatcaacggaaattactgatccaaaggacataaacattgaagaaaaatgtgggaaatgtagcactgattagatatttgatgatattaagaaattattcttggccaggcacagtgactcacacttgtaatctccgtactttgggaggctgaggtgggaggatcacttgaggtcaggagttcaagactagcctggccaacatgatgaaaccccaactctactaaaaatacaaaaattagctgggcatggtggtgggcacttgtaatccccgctacttgggaggctgaggcaggagaattgcttgaacccaggaggtggaggttgcagcaaactgagatcatgccactgcacttcagcctgggtgacagagtgagactccatctcagaaaacaaaaagaaattattctgttaggtatcataatatcatagttgatataatatgtatcatggttaatatatattatgtgtaacgtctcacggtgtgtgttttaaatacttatttgacatattaagatgaagatgtttgatagaaatttgcttcaaataattatgtagggagggttagtgagtactaaatcaaacgtagatggcatagattagctgaattgataattattgaagatttattattattactaattttctatatgtttgaaatttcctacaataaaaaattaaacaaaattagctcaaaagcaaaaatgtccagaagtagacttcaggcaagtttgatacagcaacttaataacatcatcaagaacctgcccacctcacttgcctcctctcctctcctgctctgctcctcccctccctgtcgctctcccctctttttctgcagtattgatatcaccttctggctccgtgtaatgtgcccccagcagttctaaaatcccctttcagtttggcaaaaggtacagttgaccaggtgcagtggctcacacctgtaatcccagcactctgggaggctgaggcgggtgaattgcttgagctcaggagttcaagaacagcctgagcaacaaggcaagtccccatctctacaaaaaaaaaaaaattagctgggtgtggtagtgcacacttgtgttcccagctactggggaggctgaggatgcagttagctgagattatgccactgtactccagcctgggtgacagagcaagaccttgtctgaaaagaaaaaaaaaaaccattccagtttaccaaggtaacaaccctatgccactcttccctgggaaagagagtgccctgttggctctcacagaaggaaaaggaaacttccctttctcaggaggccccagtgtaattctcctgtcaggccccgattgggctgcacatccatcctgaaccagtcactccattcctgttgatgggatacattgatgggggagagtgagtttctaaaggaaatgggaggctatagaaggaggggaaatggatgctggacagcaatccacaagtaaccttaaaaactgccgccatggccagatagattggtccagagaggacatctgacctttgctgccacaatcaaattccttccttaccaaggcagtggagttagagaataatcagccttacctttgtgtcataggcatgggagtatgtggactgcctgaagccatcttccctggtgtgtagacaaagtccgcctgccattagagaagaggatgccaactaagagcaagaaactgaagcaatacaggacgaggcaggttcctaatttcttgtttgagtttctggacctattcatgcatgaagctgggtcagcccacagacttcccagatacattagccaatatttggttttctacttttttttttttctttttgagacggagtctcactctgtcacctgggctggagtgcagtggcaccatctcggctcactgccacctctgccctcccgggttcatgcgattctcctgcctcagccttcccagtagctgggattacaggtgcacaccaccgcaccctgctaattttttgtatttttagtagagacggggtttcactatgttggccagactggtctcgaactcttgacctcatgattcaaccgcctcggcctcccaaagtgctgggattacaggcgtgggccacagctcccagcccgttttctacttcttatagctcaaagagcctgaatgaatacatatgcactgtgcagtgcaagcatgactgtcttaggtcaggttctctctaaagcagaccctgagatgacaattcacgtgcaaataattatttactcccaggagaagttgattagtgaagtgaggtgtcatatcttgcaaaatctcacttcatcatgatcctctaggtatctctagagcataaattacacttcagagttggtcctacgttgaggttggttttcatactcctgcatgtgtcagtcattggctaagaactctgccccaaggacatataaactttccagcatctctgctcttggggagttcttgggaggtggcatcagtaacccaagatagactgaagatagtcgcaagtgcaagcccttagaaacacagacctcagaagctgggagatgcatgtgccaagctggtcaggggttctcagagaacctggctggagcaccacagtgtccactacagaaagaaaagcaaggaaagaggccaaacggagagtcaggaattgctgggggctccatgcgaacaagtctaagagataaaaatgccagggggacccagtcgtcagggtgcccccccccaaccccccgccgccacttctgtgtttgacctccaggagcgctactgggtcctcacagtgaatgtcagagaaaaatcccctcaggctcctggcagagggacgggaaaaggaatcattttgaaatataccagggcattctgttcttttttacaaggtctgtcaacaggagaaactaaccagagcctaaccagctgggcttttatcagaacctaactgacccaggccaaaaacaaaacaacaaaacaaaacaaagcaaaaaaactcaaaacctaggtggccccagccttccacacgggagaagggaaatcaccaactccagcccactctggctgttctatccccctaagacgagagggggactgagaagcacttgtgaaactcacagtctgagaacacaggctcattgagagactgagacctagtcataggactacagaatgcttctcctctccctacaccttaccaacacattactaaaggcctatttacaacagttccatttatctagtacatcatgtccagcaatcaagaaaaaattacaagatatactaaaaggcaaaaaaacaaacaaacaaacaaaaaaaacacatggtttgaagacacagagcaagcatcgaaaccagactcatatgtggtaaggatgtcggatgatcagaacagaaatctaaaagaaccatgattagtgtgctaaggcaccaatggacacagtatacatcatgcaagaacagatgggcaatgtaagcagagagttagaaattctatgaaagaatcaaaaagaaatgctagagatcaaaaacactgtaacagaaaaaaggaatccctttgatggtcttattagtagactggacacaactgaggaaagaatctttgagcctgaggatatctcagtaaaagcctccaaaaatgaggccaggcgcagtggctcacgcctgtaatcccagcattttaggaggccgaggtgggtggatcatttgaggtcaggagttcaagatcagcctgaccaacatgatgaaaccctatctctactaaaaatacaaaatcagctgggtgtggtggcgggcgtctgtaataccagccactcaagaggctgaggcagaagaatctcttgaacctgggaagtggaggttgcagtgagccgagattgtgccactgcactccagtctgggcaacaagagcgaaactccatctcaaaaacaaacaaacaaacaaacctccaaaaatgaaaagcaaataggaaaaaagacttaaaaaaaatagagcaaaatatccaagaacaatgaggcaactacaaaggggtaacagatgcatagtgtaataccagaagaagaaggaaagaaaggaacagaagaaatattggaataataatgactgagagtttctacaaattcatgatccaaaccacagagccaagaaactcagagaacaccaaacaggataaatgcaaaaacaacaaaaacaacaacaacaaaaacccacacctagacataccattttcaaactacagaaaatcaaagataaagaaaaaatcagaaagaagtctaaggaaaaaaaatcctgcctcataattcttacaaagaattacgtccagcttctcagaaaccatgcaagcaaaaagagagtggagtgaaatatgtaaaatgttgagagaaaaaaactctccaacctagaattctgtaccctgtgaaattgtccttcaaaagtcaaggagaaatgaagagtttctcagacaaacataaattgaggaaatttgttgccagtagatctgtcatgcagaaaatgttaaaagaagttctttagagaaaaagaaattggtataggtcagactcttggatctgcatagggaaaagaagagcatcagagaagaaattagtcaatgtaaagtaacaatttctatttttcttattcttagttgatttaaaagatagcactttcttcaaaataataataccaacaacttacttggttatatgtatgcttctatatatgctaatgtatatatgcttatatatgtgtgtgtgtgtatgcacagacagtgtcccgagtccctgggtgcagtccttccagaggccaccgtgactctgtctgtcctgctcaggggaactggttcatttcctcccacctgcccttttgttctttttcactccaggtcataaggtcctgaccattacggggaccctcctttgctccaatcaggtgtggcctgggagctgggtcacagaaagcaaggcagcatctctggacaggtctcttcaagatattgtgacctgaagggaggtttgggcaaggcggcccctggcagtttctgcacctgggcgctgagcacagggggcccctggggagggaccacccagctcctgccttccctgagaactgcctgttcccccagttgaaggaatggtgtcagcgttccatgcctcagtctcacctggccatggcagattggactggggtggatacctgccccaagcctgggcaattacgttctctttcgcaggtattgaaactgggaccagagactgtagttcagagatgctggtggctgcagcagagaggtggtgcagggatgcagctggggagtctgacaccgcttagctgcagggctgtggctacaatgtgcttgctgagagacacaatacacagtactcaagctcgtcaatcagagcgctgtaacaatggtgagttcctggtagccatttcgtgtctttggtagccctctcttgccccaaggccacattttcttgatccaggaatagacccatcatctaggttaggttatcagagtctctaacgcatgatactggactcgaggctagaatattgcatgggtttttgttcgtttgtttttagagacagggtcttgctccatcacccaggctggagtgcagtggcccaatcatagctccctgcagcctccagctcctgggatcaagcgatcctcccacctctgcctccgcctctcaagtacctaagacgataggtgcgagccactgtgctactggctttcagtcttcacctgaataacttattaaatggtggggcttggatataggcactgttgatactttctgctatgtaaactgaaatgcatgggacattctgttgagagagggagacggcagcagatgcagaatgaggagagtcctgacagcattccacagcctgtggctgttttccctgcccacctgtctttgtttccacataaagggaatttatgataaatcctctattttctttcttttttttttttgatggagtctcactcgcaccctggctggagtgcagtggtgcaatctcggctcactgcaagctccacctcccgggttcatgccattctcctgcctcagcctcccaagtagctgggactacgggcgcccgccaccatgcctggctaatttttttgtatttttttagtagagatggggtttcaccatgttagccaggatggtctcaatctcttgacctcgtgatttgcctgccttggcctcccaaagtgctgggattacaggcgtgagccaaaattgtctatttacttaggttactatctagtttgttttttttttaaaaaaaacagaatcttgctctgtcacccaagctggagtgcaatggcgtgatctcagctcactgcatcctctacctcccaggttcaaacgattttcctgcctcagcctcccaagtagctgggattacatgcacatgacacgacacccagctaattttttgtacttttagtagagacagggtttcatcatgttggccatgctggttttgaactcccaacctcaagtgatctgcccgcttcatcctcccaaagtgctgggattacaggtgtgagccaccgcacccggcttttttttttttttttttttttttttttttgagacagagttttgctgtcgcccaggctggagtgcagtggtgcgatctcggctcactgcaacctctacctcccaggttcaagcagttctcctgcctcaacctcccaagtagctgggattactgatgcatgccaccatgtctggctagtttttgtatttttagtagagactgggtttcagcatgttggccaagctggtcttgaactcctgaccttgggtaatccacctgcctcagcctcccaaaatgctgggattacagatgtgagccaccacgcccagcctagttcttgaatccaaatttccttaccaacccagcaaggaagcgataaattgaaaatttcatttaaaggagtccccaagccactcagtagtatttatcaacaggattaggtaaatgtaacatagtatggaattattaataattaatttcctccaataaagctgaatataaaggtaagagacattgaaattatattacgaagagtgaaataactgaaaatgacacaagtgagattgttctaaaagtttcttagaatcttaggacacatttgctcactcattcaagctaggtcaagcaaaaaaaggaattaattggaaggacaaaggaatgggacctcatggcaacaatggtcaaaaatgcagttactcatgaagaatcagtacctagtaagtcagaagagtgtactgtggtgtctctcaggaaccacatgacccctcggccctgcagctcagcggtgtctgactccccagctccagccctgcaccacctctctgctgcagccaccaacgtctctgaactgcagtctttggtcccagtttcaatacctaggaaagagaacttaattgcccagccttggggcaagggtccaccccagtccaatctgccatggccaggtgagatcagggcatggaacgctgacacagaagctggcactgtccctttagaaagcgttgggggacaggccgttctcagggaaggcaggagctgggtagtcctccctgaagtgcctctgtactccgcacccaggtgcagaaaccgtaaggggccgccttgctcaaacctcccttcagggcacccgtccagagacactgccttactttctgccttactttctgccaggtgatcctgactcccaggccactcctgactggagcaaaggagggtccctgtaatggtcaggacctttttcaatggtgagtcttgaaattcaaatgacctgaagtgaaagagaaaaaagggcaagtgggaggcaatgaaccagcacacctcagcaggaaggacagagtcatggtggcttctggaaggactggacccaggacccagggactcaggacactgtctgaccctctgtcttctccgctcgtttttgcttctccctatggaatgccctcatcctctccgcctgggacctcatatgcatcatgccaggaagcacggcaggaggcccttcagattgatgtttgaccatccctacaatgaaggcaaaagcagcctttctccaatttgagcttgaaaaatcctccatgaggactcgttaggaaaatatacatatatatatatacacatatgtgacaaaaaattaaaacaaacaaaagtggaaaaattgtacttttaaaaaatgttatgtactcatcactggatttcaacaattatcaacaaacgggcaatcatgtttcatctgtacatccaccctccactggattattttaaagcaaatcccaaatattctgtcacttcctctgaaatacttctgacgtatcgtaaggagttttaaaaacttaatcataatgccaatatcatgctaaaaaattagcaaaaatgccttaataccatcagcatagtcaaccagtgttcacatttctctagctgtcttaaaaattgaaaaactggaccagagcaattgggcaagagaaagaagtaaaggggatccaaattggaagggaagaagtcaagttagccttgttcacaaacaacatgatcttatacctaaaataacccaaagatttcaccaaaaaaccattagaactgataaacaaatttggtaaatttgcaggatacaaaatcaacatccaaaagtcagtagcacttatatatgtcaatagcgaacaatctgttaaaaaaaatcaagaaagcaatcgcatttataatagctacaaagaatattaaatacctaggaatcaatctaaccaaagaagtgaaaggtctatacaaggaaaactataaaactccaatgaaaaaaatagaaaaggacatacaaaaaagtgaaaagatattccatcctcatggattgaaagaattaatagtattgaaatgacaatactatccaaagcaatttacagattcaatgcaatcgctatcagaaataccaatgacattcacagaaatagaaaaaaaaatcctaaaatttatatagaaccacaaaagactctgtattgccaaagcaatcctaagcaaaaagaacaaagttggaggcatcacactacaaacttcaaaatatattacaaagctatagtaacccaaacagcatggcactggcataaaaacagacaaatataccaatagaacagaatagaggacccagatataaatccacacattcatatccaattcatctttgacaaaggtacaaagaacgtacaatggaaaaaggatagtcttttcaacaaatgctgctggaaaaactggataaactatatgcagaagaatgaaactaaacccctatcactcagcatacacaaaaatcaaatcaaaatggattaagatttgaatgtaacacctgaaattatgaaactactaaaagagaacatttggaaaatgctccaagacattggtctcgggcaagcaaagatttttttgtgtaagacctcacaagtacaaacaacaaaagcaagtgaaaatagacagatgggattacatcaagctaaacagcaaaggaaacaatcaacaaaatgaagagacaactcacagaatggcaggaaatatttgcaaactacccatttgacaagggattcataatcagaatatataagaagctcaaacaacagcaaaaacaaaacaaaacaaaatacaatctgatttttaaatgggcaaaagattggaatagacatttctcaaaagaagccatacaaatggctaacaggtatatgaaaaaatgttcaacatcactaatcaccagagaaatgcaaatcaaaaccacagtgcagtatcatttaaccccagttaaaatggctgtgtcaaaagaaacaaagagtaacagatgctggtaaggatgtggagaaaggggaaccctccgtcttacactgctgatgggaatgtcaactggtatagcccctatgggggacagtataaagcttcctcaaaaacctaaaaataaaactaccaagtgatccagcaattccactactgtgtatatattcaaaggaaagaaaatcaatataccaaagcgacatctatgctcccatgtttattgcagcactattcacgatagccaagacatggaagcaactgaagtgctcatcaacagatgaataaagagaaagtagtacacacacacgatggaatattattcagccattaaaaaaaaaagccaggagcgatggctcacacttgggaggcagaggcaggataatctcttggcgcaagagttcaagaccagcctggacaacatagggagaccccatctctactatattaaaaaaaaaaaaaaaaagccaggcatgatggtgtgtgcctgtagtaccagctactctggaggctgaggggaggattgcttaaacctgggagttcaaggctgcaatgagccgtgattgcaccactgcactccagcctaggcagcagatcgagaaaaaaaaaagaaagaaagaaagaaagaaagaaaagatcctgtcacttgcagcaacatggatggaactggaggttgttctgtaaagtgaaataagctaggcacagaaagacacatatcacacattctcactcatacatgggagctaaaaacgcggctctcatggagagagagtagaatgttggttaccagaggctggaaggggagcagggagggaggaataaaggggaaaaaaagaatataaatgtatttataaccactgaactgcatacttaaatatggtaaagaggtactgaccatttttgatatgggttaataaaaaggaataagagcaaaaaatttaaaaaatgataaagagagcaaattacataggtatattttacctcaataaaaagaaaaaagaaaaaaaacttgaaaaattggcttcaaatcaggatccaaacaagcttcactcattgcatttggtggctgtgtctctgcagactccttcaatctacaaattcctcctcttttttcctccttgtagctttttttttccccaagaaactgagccatgtgccatctagagttccccgcattccaggccttgtgtggcatctctgcagggtctttccacaggatcctctgtctgacctcgttggctggtagatctagaggcctcctttcccacgctggggtgtgcaggtgagctacctcacaggtggcaggcgctccctcagcatcaagatgggagacagcgagcctgctggcttctcttttcctgagcctggagaaaggtttcaggtgtctcacctggccatcattttagggcttcccatcaggtttctgcctgagggctttcgcagatattgaccaccattgctgggatccatttcttcttcagtatccattatctatctatcattcctactgaatttattagctagaattctttctaaagtgagttgactcagtttttctgtaaagggctagatagtaaatattttaggcctgatgaaccacatatagtctgtcgaatctttttctttttttattgctctttaaaaatgtgaaaatcttcctagacagtaggcattacaaagacaggctgcaaaccagatttggtccatgggccatagtttgccaacttccattctaaaaagaagagaacttttcctcatccactatctggttgccttaaagtattgtataacttggacaagagaggtgggattcttttcttttagttctcaacttcagaacgatggtttgaggccgagctcatgcctgtattcccagcacgttggaaggctgaggcaggaaaatcacatgtgtccaggagttcgaggccagcccggacaacatggtgaaaccctatctctacaaaaaagtacaaaaattagctaggtgtggtggtatacatgcctgtagttccagctacttggagggggctgaggtatgaggattgcttgagcctgggagatcaaggatgctgtgagccatgatcacaccattgcattcaccctgggtgaaagagtgagaatctgtctcaaaaataaataaataggccaggcacggtggctcacgcctgtaatcccagcactttgggaggccgagcgggcggatcacgaggtcaggagattgagaccatcctggctaacacagtgaaaccccgtctctactaaaaatacaaaaaaaaaaattagccaggtgtggtggcgggcacctatagtcccagctactcgggaggctaaggcaggagagttgcttgaacctgggaggcggaggttgcagtgaaccgagattgcgccactgtactccagcctgggcgacagagcaagactccatctcaaaaaaataaaaataaaaaaaaaataaaaaataaaaataaataaatgaaaataacagtctggcgcccttatgtgctccaaaggtgattaattggacacctcgtgtcaccagctcacctgttctcggctcaccgttccctccaggcgctactacagctgccaactttgctcaggtgagacttggctgctcccgcatccgctgtacctcttactttttctttcctgtcccaggactcctaggacactgtgatatgtgacaattgcagaaatctgaaagacacttgcaactgggctgcctggaagagtggggaagataatgccccgtagggcagtccttgaccaatagaaaacaaaagccagggggaggtaaacgtgttcccctttgtccttaagtgagcaattttgaggcatattttagatggttccaccaaaggtcctgcaagaatatggcccacagtcataaccacctcagcacagcacccttgtactggcttccctcctttcctgttcctccctcctgcccctggggtcactttgaaattgaactacctaacgttgttctgcccggccacggtgctcccagccactggtgagggatttgctctgctacccactctggtagcagcttcacggttcagggacagcttcattcagatgttccccaactgatgctacaaattcatcttcaagtgggcaaagcttctcagaaatgtagtgatttttgccaggtgtggtgacatgtacctgtagtcccatctactcaggagactgagacaggaggatcatttgagtgcaggagttcaacattgcagtgagctatgatagtgccactgcagtctagcctgggcaacagagcaagactccagctctaaataataataataataataataataataataataataataataaagaagaagaagaaaggccaagtgcggtggcacatgcctgtaatcctagcactttgggaggccgagaaggatggattgcctgagctcaggagttcaagcctagcctgggcaacacagtgaaatcccatctctactaaaaacacaaaaaaattagccaggcatggtggcatgcatctgttgtcctagctactcaggaggctgaggcaggagagttgcttgaacctgggaggtggacgttgcagtgagccgagattgtgccactacacttcagcctgggcaacagagcgagataagaagaggaagaagaagaagaaggaagaagaaggaagtagaaggaagaagaagaagaagaagaagaggaggaggaggaggaggaagaggaagaagaggaagaggaagaaaagaaagaggaagacaaagtcttacattctattttgtctgatattaatacagaaacttcaactgtcttatggttactgtttgcatggtataattttttccatccttttgctttccacctatttatgtctttaaatctatgatgtttctattatagacagcatatgggtggggtcttgctttttcatccagtatgactgtctctgtcttttgaggtatctagtctattcacatttaataaaattccagatatggttggatttatgctgccactttgctatttgttttatatttatctcctgtctcttctggtctgctttactgccttattttatgttaaatgtgttttcatgaactacatggatttatctgttgattttctttcttactattttttttgagttttttcattagtgattgctctagggattacaatgcacatcttaattcagcacagtctgtcaaatttggttttttgttttttttttttttagatggagtcttgctctttcgccaggctggagtgcagtggcacaatcttggctcactgcaacctctgcctcctgggttcaagtgattctcctgcctcagcctcccaagtagctgggactacaggcacgtgccaccacgcccagctaatttcgtatttttagtagaggtgggttttcaccatgttggccaggatggtctcgatctcttgacctcgtgatccaaccgcctcggcctcccaaagtgctgggattacaggtgtgagccaccgcacctggcccaaagttacttaatttcagtaaaatatagaaacctcggccaggtgcggtgactcaggcctgtaatctcagaactttgggaggccgaggtgggcggatcacctgaggtcaggagtttgagactagcctggccaacatggtgaaacactatctctactaaaaatacaaaaattagccgggcatggtggcgggtgcctataatcccagctactgggaaggctgaggcaggagaatcacttgaatgatggttcaagcgaacggcggaggttgcagtgagccaagatcatgccacttcattccagcttgggcaaaagagtaaaactctgtctaaaaaaaaaccaaaaaaacaaaaaaacccgctcgctccaatttgtatttgtctcactccaactgtacagtattatgatgatgctttatttaatattacgtattttttaaaaggcaagagaagaactagagtctctttagtctctttacagactttaatatttaccatttctgatattcttcatctcttgtgaattgaagttactatctagagtaactttcagcttgaagaatttcctttagtgtttcttgtaaggcaggtcattagcaacaaatgctttcagtttttatctgggaatgtatttattttacctttattttgatattgctggatataaaattcttggttgacagtttgctttattcaaacatttggaatatgtccttccactacctttagcttccattttttttctgatgagcagtcaagtcattaatcacatttcccttgttgctttcaagaataagaaaatacacaggccaaaatatcacagatttacactgttcttacttaaagtttagtaattttaattaataaatgcttctccgtttgctgtatgcctttggtctattatttccagaggcctgcaatggttatttttgacagttttgtccagtatcattgtggcatttaaggggcaagatttgttgacctcactccgttgtcatgtcagacatgagaaaatggtttgttgggttttttttttttttcagatgaaatgagaggtcactgagatgtattaagcggagaagggaaataatctgtttgtgttttaaaagactgctttagacactcatattagttaattattgctgcacaaaaaattaccccaaattgatttacttacaacaacgcacatttattatgtcatagtttctgtaggaattttgcaagcagtttagctggatggttctgactcagggtctctcatgaagttgcaagtggtatgtcagctgggacttgactgaaagtggagaatccacctccaagcccacttacttagctgctgtaggagccctcagttcctcactatgggtttctccatgggcctgttcacagtgtggcatctggcctcctccaaagtgagtgatctgagagagtgtggccaaaatggaagtcccagtgtcttcttatgacctagtccatgaagtcccccactgtcactgccttattcattagaagtgaatcactaagttcagctcacacacaagaggaaagacattaagctccgcctcttgaagagaggagtataaaaaaagttgtggatacattttgtaaaccatcacactgctgtttggagaatggactgtaatagagaacagaaagatgagtcagatcagtctgtggctactgcagccacccaggtgagagctggtaagagcctgaactaagacagtggcataacgatggagacaagtgaatagatttgaagtagattttgcacgtggatctgatgcagaatttgccttgggttgaataggaatcatgggggaacagaagttacaaatgatttccaggtgtctggtatttgtaactaaggacgtggtggccccatgtcctctctctctcccttactctctctctctctggcctgccctttctttctccctttctctctctctctctggtctggcctctctctctctccccttactgtctctctctctccttttgatgtctgcactccagccattttctttactgtcatttcttattttctccactgtaccctattctctttgtcctccagattgaagtcacaagtctcagcttaaacataatttccctggaaaggacttcttgacctctttctgaggtcgctgcattttttaaaaaaaattgttagagatagcttctcttttctccttttttgccattagcaccagatgaattgtgtctctgattcagctatatcccagcacctgacacctagtaggcactcagtaagtatttcctcaatggattaagtgaaaccaacttctaattttcataaaaattctccaccagaattcttctttttcttctttttttttggtgggggtcaggggacagagtcttgctctgtcacccaggctggagtacagtggtgtgatctcacttcactgcaacctctgcctcccaagttcaagcgattctcctgcctcagcctcccaagtagctgggactacaggcacccgccaccacacctggctaatttttgtatttttagaagagacggggtttcaccatgttggccaggctggtctcaaactcctgacctcaagtgatctgcctgtgttggcctcccaaagtgctgggattataggtatgagccaccgcacccggcccagaattcttcttaaacaggaaaatgactttagaacttaaatgactttaggagtatttaagcaatgcaagctaatctggacaatctagacaaggctttggaaaaaacaacagatccacaatatctcaggaggcaagacctatagacccaactacttttttttttttttttttttttgagacagagtttcgctctgtcacccaggctggagtgcagtggcatgatctcggctcactgcaagctccacctcccaggttcacactattctcctgcctcagcctcctgagtagctgggactacaggcgcctgccaccatgcccggctaatttttttgtatttttagtagagacggggtttcaccgtgttagccaggatggtctcgatctcctgacctcgtgatccacccgcctcggcctcccaaagtgctgggattacgggcctgagccactgcgcccggctgacccaattacttttaaatcattgtgacttataggctgaatgtaatggtttcattacgggttgttaatccatttaacaataaatggattaaccaacctgttggttgaaggagaagtgagctgaataatccccaattccgtaggcacaattagttatacatacattaattggtccgctttcaattctggcactattttttaaaaaatctaagaggagaggtaggaggagtttaacagccatctattctttccaacattttgagaaagcaagtgaaaatgaaccctgaaacaagccaacagcaggggcactcattaacttaatacactttaatcttgtgaatagaagctggagctggatcctttgaatcggagctgcagacttccacctccaaccacctgcaggacatctccgcatgggtgttctgttggcacctctaactcagcacaacccaatgaactcattatcatcccatggagaaacctgccctcctcctgggttccctgtctcagccatgggccatccccaggcacacaagctgggggtcacagcagcatcttccctgcccctgttcctggcccccatctcccacccccaaggctgttgtatcctctggacttgaccccaacttcacagcagttagccacagctccttctcagcaaccccctccattaatgctcacggaagcttcttaatttacattctcaccttctcacttccttctgtaaggccccctcagctaggagaaatgcctttgaaaattcagatatgtcctttcacccgctcagagcaagaaaaaaaaaatccaaacgtttcatcttcctcataatgatgcatacttgctgagcacctaccatgtgcaagctctctgctcagtgcttggcatacctcattacattcaatccttagagatggccctcagttaatacagacctaactccctcccaagatctggccctccctgccttgcccacctcatctagatttctccttggcctgccaggtgccgctctcagtggcctttctgttccaagtacgcatgcctggcctttgccctggcagttctgctctctggaaatgctcttgcctgggtcttagctagcttgcccctttcatgacatgactcagttcaaatgtaagctgctcagcagccatctctgatctccccaagaagattctattatcacagaatactagcactgatcaccttctgtctttatcttatttgttccccccaccccctccccccattcagctccttcagtagaatgtaggctctacccggacaaggatcaggtccaacttgttcaccgagctccagggagcagcgcagtgctgggcacttagggaacactcaataaacatttgttgaataaatgaagacatattccctgataagttctccaaaagtagtcactattatcaatcttctggagctcttttctctaatactctttccttactgacatgggcattacctttcttttttttctttatagacagggtctcactttgtcacacaggctgaaatgcaatggcacgaccatagcaaactgtaacctcaaactcctgggctgaagcaatcctcctgcctcagcctcccgagcagctaggactacaggcgtgcatcaccatacctggctgggggcgggggaagggggggggcggtgtctcgctatgttgcccaggttggtctcaaactcttgcctcaagcaatcctcccaccttggcctcccaaagtgctgggattacaggtgtgagccgcggcgctcagccacgggcgttacctttcaaagcatccagattttatggcgttaatctccctgtttaaaattttctgtgatttggacacaaagatgggaacaacagacatggggtattccaaaaggcagaaggtgtggaggggggtaaaggctgaaaaagttgccgaaaggattagaagcatcacgcaatataccaatgtaacaaacctgcacacgcaccgaatctaaaattaaaacaaaacaaaaacacaacaaccaaacaaaaacctttccgtgatcatcaggaggctgtcatattctcaccccctacttcacgctgggaatcgagctgcgggctttacaacagcgtcagctgctccctttggcaacgaccagagaggtcctttctccagagatttttgtcagctctgggcacttttgctttgtgggcctatcttccactttataaaaaattaaaaatgctactttccactgcattcagtactttttcttctcttttcttttttcttttcttttctttctttcttctttctttctttttctttttctttttttttttttttttgacacagtttcactctgttgcctaggctggagtgcggtggtgtgatcttggctcactgcaacctccacctcctgggttcaagcggttctcgtgactcagcctcttgagtagctgagactacaggcgcccgccaccatgcccagctaatttttgtgttattagtagagaaggggttttaccatgttgaccaggctggtctcgaactcctgacctcaggtgatccgcccgcctcggcctcccaaagtgttgggattacaggcgtgagccaccgtgccctgccctttttatgtatgtatttatttatttgagatagggtctcgctctgtcgctcaggctggagtgcaatggtgcgatcttggctcactgcaacctccgcctcccgggttcaagcgattctcctgcctcagtcacccgagtacctgggattacaggcgcatgccaccacgcccggctaatttttgtattttgagcagagacggggtttcaccatgttggccagactggcctcgaactcctgacctcaagtgatccgtcagcctcggtctcccaaagtgctgggattacaggcgtgagcccccacgcccggtcgcgtttagtactttttaccaaaactaaaagaaattaaaacactttcgtgggtcctggacacttccggaaggatttgtttccagctgccagatgaggaaactggggctcgcagagccggcgccgcaggggaggggctgtgcacgaatccagtgggaaacctctctccggagctaagcccctggtccacccgggcatcgctccgggatcgactgggggcgttccttccgccggtcccctttgttcccagtgccgagcccgcggccctgcccttcctccaggccccgccccttcttccaggccccgcctcccgcccgggccgaggcgcgcggccgcgcgtgcgcccgcccgcccgtccccgcctcgcgcatgcgccgcgctcgctcgcgggagggcatggcgggggccgtgccgggcgccatcatggacgaggactactacgggagcgcggccgagtggggcgacgaggctgacggcggccaggtgaggcggggcactgggcgcaccctagagagaatcgttcgtctccgccgccggcgggccggccccactcccggagaggccgcgcggcgcgaggctgcgggcgtgcggggggtgtgcgcgcgcacggcccgcgcggtcaccgtgtggttcaagcacagcccgccccgcccccgcccgcccggggtcccgcggcgcggccgccggggtccccgcctcctcgcctgcaggaccttggggtgggggtgaggcgccggaggctctggcgcggggcggcccgaggcccccagtaccccctcgctccggccaggcccggcgccggccctgcgacccccgcggcgggcgggacaccaacgctaaggtggagggttgggtccggagctcacagacttttaaacaaaaataaagtggaaaaacttcacagcagcatcatgaggaaaaagtagaacttagggcattcctacatgtgctttactgttttataaactgtactcttcagcaccttgggctgatttcatctgtttttgggcaaactgatggaaaggattttcgggccttgaccttccagggtttggggtggaagcccaggagggatcactgttccaccctgaggacagggactgcagagccagggcaggtagctctagtctggacagtgtgtccccaccttactctaaagacccaactgaggcgcatgattgaaatgtagcttctcacgtccctcccctggagacggcccaacagttggtctggacgggagcctgggaacttgcatttttttttttttttttttttttttttttttttgtggtggagtttcgctcttgttgcccaggctggagtgtaatggcgccatcgcggctcactgcaacgtctgcctctcggattcaagcgattctcctgcctcagcctcccgaatagctgggattacaggcacccaccaccatgcccagctaatttttaaaattttgagtagagagggggtttcaccttgttggccaggctggtctcaaactcttgacctcaggtgatccacccacctctgcctcccaaagtactgggattacaggcgtgagccactgctcgtggcccaggaacttgcatttttaacaacaatcaagattggggatgtctggtgcattttgaagtggtattataagggaataaaggatgaagtggggcttacgttgataaacatgggtggtggtgtgatggcggcttcggagccatggtctaaaatgccaaggcgggcgatgtgtttctggaactgaaagaagccctgtgatgttagctgcctggtggaagcagtggcaggaggtcagtagggagcaggttctgaagatccttggagagctgctgaatggtatggcttgttcaggagtttggggcagggagtgacacgagtagatttgcatgttggatcatttcacagtgttggaggcttagggtggagtggatagagtcagacttagctaactgagagcttgggccatgtgtgtcatgcgttatccccttccacacacaggattttgagttgggtgttaccctacttatctggtaagtgtagaaaatgagacgaaaagacttactgacctgcccaaggtcatgaaactaataaaggaaggagaggggacccaaacccacatcctttgcctccgttgccacttcgtcaaattgctgactaccaaagtggtccagatgagaaggtgtgaattagcttagtggtaggttggtgtttggggcatctagtatatcaccttgagcctttttttctttttttttttttttgagacagagtctcgcttagctgctcaggctggagtgcagtggcttgatctcagctcgctgcaactgccatctcctgggttcaagcaattctcccgtctcagcctcctgagtagctgggattacaggcatccgccatcatgtccggctaatttttgtattttagtagagacagtgtttcaccacgttggccaggctagtcttgaactcctgacctcaggtgatccgcctgccccggcctcccaaaatgctaggattacaggcgtgagccaccgcacccggccttttttttttttttttttctttgagacggagtctcactctgtcacccaggctggagtgcagtggtgccatcttggctcactgcaacctccacctcctgggttcaagtgattctccaagtagctggaattacaggccggtgccaccacacccggctaatttttgtatttttagtagagatgtggtttcaccatgttggccaggctggtctcgaactcctggcctcaagtaatctgcccgcctccgcctctcaaagtgctgagattacaggtgtgagctaccgtgcccggcctcaccttgaggctttgagtcataaagtgttagaactggggcatataagggccatctaatcagtaccttcactttatagaccaagcacgtgagttatttgcccaagtttgtgcagtcagacctagaccccactgatgggagattggggagtctcatgtttggggaattttaatcatgatcctaatttggcccactgacaccagtgggctctcatggatgaggggggtggaccagacgttcatttcatgtttattctgtgactctgcttggaagaggtacagaaagttaggaaaggtgttaggagggtggcaagaactggattttaaaagatagttggtgacccaaattctgttcgcctgatgccatgttacatagtgggaggtaggaagatgtgtaaggaggccaccgtgatgttcagtctggatggtggaaactaagagctgcagacatgcaaatagatgagtcctgctacagattgcaaatggggagtggtgagaggtcagaacggacaggggaagtgggaagggcacgctcttgctagagctggggcgttttttcctgaaggagatgggaatctttaagcaggagagagacgtcagttttgtggcttacaaagatcactgtggccacggtgtgaaagatgattgaaaggaaggaataagactgagacttcaggggaatgttgctactgcaagcatacaaaaaataaggaagagcagaggcaaatgtggaaagaaggaccaccttggatagacagatgggagatggaactgatgagtctttgtgacaggatgtgggggtggggtgagggagagaagctgaggatgattttcaggtttggggggtaacaagtagatatatgaaggatacctttacggaaatatgggttgtaggaagaagatctgtttctagggaagagatgtcagttttggacctaaagagtttggatacttgtgagacatctgactggaaatgagaatggaatgttggatacctgagtctggagcttaagagaggaaagacggagagagagatccaggctaattctagattggtgagcaggtagatagcatgacccaagaggtggtggaagaggcaggtaggtgagtgcccagggtggaagcccaagagaacagacaacgtgggaatgaagctcggggtgaagtccggcctctgtcatgcccttaggggctcagcgttccccatgcaaatctggtctgagagaagactccacagcttttactgggaagtcatcgggttctgtctgctcccaaagcactgcttttaggatcttagtccagatcaggagtgagcaaacttttctgaaaaaggctagatagcaaatattttaggttgtgcctgtctctgtcttaactacttacctctgcccttacagggggaaagcaatcatagacagtccttaaaagaatgggtgtgctgtgttccgtaaaagtttatttgcaaaaataggagagggctggattcggctctgggtcatagtttgctgacccctggcccagctcttgccccattatgttagagtaggttgcatggaggtctgtctctcctattagtttgtgaacttctttgatggaaaaagccttgtcttgtcttacattttcttaggttccttggttgatgagcatagtgcagactgaatgttcaaaaagcatctgcttgttagttagggtggcagtgttaaagttggacagggtttgggatcacagtccatcctcacatggtcattagcaggtgaagaagcctgctttgcccttagatggagtgacaggcctgaagttgcttccacatagaattgggactggagtccagccagaagtgtggatgcaaggcgagttagtggtctttactttctaatggtaagtgatggctcacgctttcaagaatcaggttgttactcttcagtggcatgtatgaaataagaatagtgaaaacaataataataatagtttactatttattgcactgttacgaaatgtcagggattatgctgggttcttccaaaaattagctcatggaatcctcacaacagccaaatgggaataggcgttattattatcttcacttaacagaggaggaaatggacactcagagaggttgggtaacttgtgtgagcatggaacgcggtttgccagggaggagttgtacacacccactcagtgtgatcctggatcccattttcctagccactcactatctgtccagcccatttcatgaaattgtcatgaaagtcaaatgaaataatgtgtgtagaatactttcaaaatgggcagcattatacgatttaaggtgagattagggtatttgtattaatgaaaaaaatatcctggctcttcgcatttaccaacagcaggaggatgattctggagaaggagaggatgatgcggaggttcagcaagaatgcctgcataaattttccacccgggattatatcatggaaccctccatcttcaacactctgaagaggtatgtgagaaaggtgtctgtattgggaggaggctgggggtaatttagagaaagttttgtaatacacccagaaggtgctatgtaaagcaagagtaacgcgaactgaactaaaggcttcaagggggggtcccctctgccactttttttttttttttaaatttttttaagacagagtcttgctctgttgcagtggcacaatcaccgctcactgcagcttcagcctcctggaatcaagcagttctcccacctcagccttgcaaggtggccaccacaggcgtctgccatcatgcctggctatttttgtttttgttttttgggagagacagggctccttacgttgccctggctgctcttgaactcctaggctcaagtgattctcccacctctgcctcccaaagtgctgggattacaggtgtgcaccactgcacccagccccctccgctgctttaaaaattttgaaacctgattctcttcctccttccttaccttcctgttgtccatcattccattcattcgggtgtaattgctgttgttactttccctaggtattttcaggcaggagggtctccagagaatgttatccagctcttatctgaaaactacaccgctgtggcccagactgtgaacctgctggccgagtggctcattcagacaggtgctttgtgggtgtcccctgtcctggctagttacccccacttttttaaaaatagacttttgggtccttataacactgatacaatgccttctttgatttcctggtttctgagacttgtgtaagaaagagctgaacttcttactcatttttatctttatcttactcatttgtatctgcttgcctcttatctttgattcagtaattgaggtttactggtagcctgcaaacgtgattctcattgagctgttttccctaccatgttgtagaattataggattatacagtgtgtgttcagtgtgtcattttcaagacgtctattacagcaagcagtaaatgacggataatttaggactggctgtgattatggcttttagttaatatgatcaaagtagagtcttactgtaaatccacggagccgggtgcagatgacatcactgaagtgcgtgctgtccggaagcttgtggacacactgctgtcccggtgattagatacaagtgtgtctcttttggctgccatctgctccctcctcactgggcagggatgtttttccatccccctacctgttgctggggccatttgtctttatcctcagtgaggctctgcagatggtgctgtcctttccatgaagttaggggtggaccagacttgtgtgttctgttctgtgctgctttttggtcttatcattgataactactttgaagagttccaaaaccttacatgtataagtggtcagaagcaattctttggtatttgattcacatagagacttttgaccatttgctttctaaagccacacagtgaatggacagcttgccattgtctagttgcttttattctctttcaggtgttgagccagtgcaggttcaggaaactgtggaaaatcacttgaagagtttgctgatcaaacattttgacccccgcaaagcagattctatttttactgaagaaggagaggtgagaaattatttttctttgcctagtaccaggccctagggtcttttgcaaattccctgtgtacagtggagcgtggcatatcatgtaagtaatggcagagttgaggactaaaatcagagtgtgagacagaagttgcatctagtcagaattgccctttaaactctgtacccagggtcgtgacatgcttgcacgcaagaggcacacaggtgctgagatcaagagaatgaacagcaagttcccaccatttcccctctcaggctgactccagggcacagcccttggagtgttgtggtggattcgtttggttcctccaagaagcagctgccaagacagggctaggcctgcaggagatgatggggaagcgactatgagggaagatggggtagggctggaggaggctggggtagctgtgatgcagtctgacccttgagggcaagagaaaaggaatgagggttagtaggaagaatgttaggctgcagtgcagtttccagaacgttccagccatatcagtggggaatctttaagccacaggtgcccattctgggagcccacgtctcctggacaggcctgcttttgaggccctgctgcattccatctgtggctgggagcagcctcggggagctggccttggcacaaacaggatggcaggttcagagcacagtccttgaggacatccgtcacataggagagctgagagaaatgtttttctggctactccatgtggtgatgggccagaacacctgtgccatttaaatggcctctttctcttttgctaagggcatacaagctggggcagcatgagctccctgtgtgtgcaaggcagctctatgcggttctcggtgtctcctaggaagcaactttcagtaccctcctgtgttgagtccgattttctaaaagctgagcgggcatctagggacctttctgtcactcagccgactgtgtggctgtggccagctctgggtctgcctcccccagaactagatgcccatggggagtccatcagcaccaatctcctgtgatcgtttatacaacagaatctccactcaagtaaaagtggggcctcctcctatcttgctgtttgtgtgtgtgttggcagaccccagcgtggctggaacagatgattgcacataccacgtggcgggaccttttttataaactggctgaagcccatccagactgtttgatgctgaacttcaccgttaaggtaggaagagttctagagttaaggagaaaagtgtttatgaatgtttatttttggttgttggtctgtttcctttgacagttcatatttgctttttttccataaaggtctttattgttttattttcataagccttacactgagaaagaaaagtgtaaaatttgtatctgtttttgggtcagtgttgactgtgttttaggatttagcagggatacaagaattctcttgtggttggagaggagctttaggcgtgcctgcttgatcttcctcttgcatatgaagaaacgatggagaggtggtcagcccagggcacacacctaggtgatagcagggtgagggcggagtgaaggcctgagacccacgaccagcgcacacttactccacctcaccatgaacactgacaagccagcttcccgtggaggtgcggtcactgcatgcctcccctctgacttcttgttttgtgtcctagcttatttctgacgcagggtaccagggggagatcaccagtgtgtccacagcatgccagcagctagaagtgttctcgagagtgctccggacctctctagctacaattttagatggaggagaagaaaaccttgaaaaaaatctccctgagtttgccgtaagttctttctttatgaacctcagattagaaggaggctgctttgggtcttggttttcaagcatgagatgctccttccctggagagaatctccatttctgagggcaccttccaggatgctcactcccgggcccgagcacggtggaggcttggctctcgtccgcccgtctgtgctacagtagtaaaccctgccccctctctccctgcaatcttgcagaagatggtgtgccacggggagcacacgtacctgtttgcccaggccatgatgtccgtgctggcccaggaggagcaggggggctccgctgtgcgcaggatcgcccaggaagtgcagcgctttgcccaggagaagtgagaggccctgtttctgctcagcccttccttcctagtgctccccacaaaacccttcccatggcccgtgttccacagccaaagctgctagctccttctgttcaacgtagaggtaaacttgcttttggctgggcgtggtggctcacgcctgtaatcccagcactttgggaggccgaggcggatggatcacctaaggtcaggagtttgagaccagcttgaccaacatggagaaaccccatctctggtaaacaaaaatacaaaattagccgggtgtggcggcacatgcctgtaatcccagctacttgggaggctgaggcaggagaatcgcttgaacctgggaggtggaggttgtggtcagccaagattgcaccattgcactccagcctgggcaacaagagcaaaactctgtctcaaaaaaaaaaaaaaaaattaaaaacttccttttatccagcagagctggaaaagttggagttgtttttggtatacttggagagctggctttctaaagtgctgctttgaggactgttgtgtaaagcacttgattcgtcttccctttgctggagttatgggcctgggcttttacactggggttctgaagtaacaaacaaagtcagtccagaaatagttgctcagcaatctcattgttacagtgtcgcaaaatgagctcatattagctttattttctgctaccaatagagtgttcctaagtatttaaagtgtgtgactcctttcttatagagccagcaagctgtattggaatcacttttccagtgttgtaaatgttatttttgtgggtcagtcagtatactcgtgaatgacagaaaaacagatcccaacaatgcaaagtattatatgtgtaaaaaagaacagaaaaaagaagctgccttgttagtaacggggtctatggtttttctcatcaagaggtcatgacgccagtcagatcacactagccttgggcacagctgcctcctaccccagggcctgccaggctctcggggccatgctgtccaaaggagccctgaaccctgctgacatcaccgtcctgttcaagatgttcacaagcatggaccctcctccggttgaacttgtaagttgcttctcaagaatccccaatgtcagctggtaaggtgactttggaaagtctgtgcttgtctgattgtctgaaggctgtgaatgcaaatccatcattgtcctggtccttcctcagtcacactctctgcctggagcctgttgggcccctgctgtgtagggaaccctgaggggaggtgggtgagcagtgccctcacgcctgccatcccgaactgggcatatgcttctcctcagatccgcgttccagccttcctggacctgttcatgcagtcactctttaaaccaggggctcggatcaaccaggaccacaagcacaaatacatccacatcttggcgtacgcagcaagcgtggttgagacctggaagaaggtaccatcggttctgggaatttgtggattttttaggagacaaatatcctcctctgctttgatattattttggaattttggctgcaagaaatcttgaccctccctagtatcaggcatgtgttttcttgtgtttctgcgtagagaaagcactaaacgtctccagaaaatgtgcgtaatgtctccaatgctctgcaaaccgtaaattgaaatgtgactaaagaaatgaaactgatttccgtaagacatggacaaacactagtctcattgcttttcagtttctgtacactgtgtgactgtgaagtttgacagctgaattgactcccaacttaagtagaaatagggaaagtgctttgcaagaagtggccgacaccagaacaccccgacagcagggatatctgccctgtcaggctcaccagcttgtgtgtgtgttttcagaacaagcgagtgagcatcaataaagatgagctgaagtcaacgtcaaaagctgtcgaaaccgttcacaatttgtgttgcaacgagaacaaaggggcctctgaactagtggcagaattgagcacactttatcagtgtattaggtaagcaaaacgaaactcagttcttaaatcagtcctttggggaggaggtcgtttgagttttcatattgaaagctcaaataacaaaagcttcagcgatacttgttcattttatttattttttcatttttaaacagtatgtagggaactttaaacagctttagcagcatgagtaattttcagatgtttatttgccagaagtctgttgagtacaaattaggctaagtaaaagatagccagagttaacaaaaattgatttgaagggtctatttataggtaaagttatgcccacaaagtattgcttacatagaaatgatttgtgattatgccaatcatataaatagacgtgtcctagaaatagtgtgtcctcttaggcatgtctttcccctaataatttatactagggatgaagaaagagtttgctaaataaaggtaaacttcaacccagtccaccaaactcactgagtatcactcattaatgatcttttcctttcgataagtggtttaaagtgagcagagaattgaactctgcttcttgcaccgcatgttgagtggctgctgatccattcacactatttactaataagcagagcttacgccaggcacagtggctctggcctggaatcccagcaatctgggaggccaaggcaagaaaatagtttgagcccaggagtttgagaccagtctgagcaacatggtggaccctctctctacaaaaaattagctagacatggtggcactcacctgtagtcccaggtactcgggaggctgcagtgagccatgattgtgtcattgtactccagcctggaagacagagtgagaccctgtctcaaaaaaaaaaaaaaaaaagggttggggggcgtattgaagggtgaatgatggagtcatttgagtttgtttttaactttcctttaatgcttttctagcatattttgtgttttaaattgttttttaaaggaagcattctgccttaactgtaggtttccagtggtagcaatgggtgtgctgaagtgggtggattggactgtatcagaaccaaggtactttcagctgcagactgaccatacccctgtccacctggcgttgctggatgaggtaagagggcggagagctgttcacagcctacacagtgtctgtctcatgctgtttacgttggcattaacattgcatctattcagtgagtttagaggatactcttctcaaaaatagttatttctgtcctgaggattttcctcttaaggacctagcttcattgactgcagaaatttcttaacctcagtcaagtgttactggaagctgatggccctggcttaggtgtcaggaccttcttccacagtgataagctctttggtggctgtgacagtgcccagtttctctgtgtgctgagcgtgaccacactgctcagcgaagctccctctggcctgtttgtagatcagcacctgccaccagctcctgcacccccaggtcctgcagctgcttgttaagctttttgagactgagcactcccagctggacgtgatggagcaggtgagcagtgcccgtggggcttgccagagggctgaggaggaccctctctaaccagctccctgtcccccttcttctgtagcttgagttgaagaagacactgctggacaggatggttcacctgctgagtcgaggttatgtacttcctgttgtcagttacatccgaaagtgtctggagaagctggacactgacatttcactcattcgctattttgtcactgaggtcagcaatgcaccgttggtttcatgtttcatactgtttacactagcactgccctttttggcttaatttagttcattttgtacctaactgagaactgtgctttctgatgtagtgatgacaatgacagatactcgtttaccaaaaagcaccttctgcctgcagcagctgtatgacacactttacctccattaccaccctgggcatctgaatgttggagatgggtggtgtcaccggccggtgggggtggggagggattttttccaaactgatggccatttcacccggatgtcggtggatgccccgcactagtgtgcggaagaagtcaccctgtgctcccccacgcaggtgctggacgtcattgctcctccttatacctctgacttcgtgcaacttttcctccccatcctggagaatgacagcatcgcaggtaccatcaaaacggaaggcgagcatgaccctgtgacggagtttataggtgaggccgactgcctagccctttactacaatagaaaatgtcagctgggcgcggtggctcatgcctgtaatcccagcactttgggaggccaaggtgggtggatcacctgaggttgggagttcaagaccagcccgaccaacatggagaaaccccatctctactaaaaatacagcattagctgggcatggtggcacgtgcctgtaatcctagctactcgggaggctgaggcaggagaatcgcttaacctgggaggcagaggttgcagtgagccaagatcgcgccattgcactctatcctgggcaacaagagcaaaactgcatctcaaaaaaaaaaaaaaaaaagaaagaaaatgtcatgttctacttcctgtttctaacacagtcactgttttcctcgttaaagctcactgcaaatctaacttcatcatggtgaactaatttagagcatcctccagagctgaagcagaacattccagaacccgttgtggaaaaaccctttcaagaagctgttttaagaggctcgggcagcgtcttgaaaatgggcaccgctgggaggaggtggatgacttctttacaaaggaaaatggtagcagcttcagtgagaaactgcccttacaaacagtcccttctctgctgtcaatccaatactgctcccaaatcctgttttcagtgttcatttccctcaaggcaggcgctgggctcccacgacccctcaggacagatctggccgtcagccgcgggccgctgggaactccactcggggaactcctttccaagctgacctcagttttctcacaagaacccagttagctgatgttttattgtaattgtcttaatttgctaagaacaagtaataagtaaatttttaaaaagcctttctgctgggttggattaagtcctgatgtgacattgtttttgtgtgcgaataaggcacgggcagcctcagtctcgtgcagagccagatactttattcatcacttgggcgatttgaaactgccaactccctccctccctcccccacccttgattctaaagtgacataagaatggtgataagtctgaactctttcacctcttaaatgccatattattgcccacagttgccaaatacaaaatatcaagtcctctgctgaagaagactgaggtcccatcgtttcctgtgtcgcaggtcacttcttcaccaggtggctgactgcatcattgtgaggcagagccatgctgtgcaagtgtcataagtcatcccactttcaactctcaggaacactcgcagccagtgccacgctgtcctcgccatccaatattgatagccaccccagttcctgccagccagcctggcacacataaccataggatcccctctggtcatgggtcaccatgccttttcttaaactgcgcttctagtgacatggccttaaacgatggggtccccaaatgtacagtgctcctcgatggcaaggttgtatctggcgcccttcccatccttataggtgctggtcacgatcctcagccagcctctctcgccctgtgagaagtgggatcgcgcgtcagcccatctgcagccgtctcccgctccccttgctgccgtcagccccctgccccctgctttctgcctccatctctcaggccagccttgggggatccagacagcccactcagctgcccctcagctttcccatgacccctgttctgaaataccttttgtgaaacatttcacttggttaatgtttaacatgagggccctctatgccagaagtgaattcatctcacaaaacatgttgactctagactggtgcctcctccagctactactacccccattagtcacctagtaaaaaatgacgacatttcatcacctgcacatgaaccgctttccccccatttcttaatcatgaatttctgtgtcttaaattattaatggctaagactaggtctggcagttaatttctctctcctggatttttggcccaactcgagtatttttgaaaaaccgacacagtattttaggggagcccaaaaaccatgatgggaaaaagaatgagctggttgtaaaggaagagggtggcagagcccctctccagcagtgctcacagggacttccccagggcaccaggcaccatctggagacggttttggtcacactgggattgcggggagtcacctagtgggtggaggggccagggatgctgctgaacacccaaagtgcacaggatggcggcagccgcgcatgtcagagaagggtctggccccaaaagccactcgcgcggtggctgagacagctggagcaaggaaccctctgtcaaggccccagtttttagctaaacgtaaacagaaccattcaagcgagaggagtaccaggacgtttttttctaggaatgaccttaagaaaatgaaaacatcttacccatggttcaccccatgaattccggacaatccagtactcagtcccatcactgatgccccacccagccacagaaacgacatggtttatatatgtggtgtcctggtattcggcatagatgcctccggtgtagttagccagtctttctgttgccattattccacagctgagagcaagcagttaaagaattaccacttttaaattgagagaatttaccgtcattagaaataatctgatatggctgggcgccgtggctcacgcctgtaattccagcactttgggaggccgaggcaggtggatcgcttgagtccaggaattcaagaccagcctgggcaagatggcgaaaccccacctctacagaaaatacaaaaattagctgggtgtggtggtgtgcgccagtagtcccagctactcggtggagggggctgaggcgggaggatagcttgagcccgggcggtcaaggctgcagtgagcgaagatcataccactgcactccagcctgggtgacagagtgagactgtgtttcaaaaaaaaaaaaaaaaaaaaaaatctggtatgacaacaaagtgtaaacccgactcaggtagtgtatatctgacggttctggataaacttctgttgttattcacatagtgtcttccctgctgaaactgccccctcggtacagcttggagcgtctcatccgcattccgcacaaccatccataggggcagacttgctatcagctgagtgttaactctgagaaaactgaagttcttagaggggaaatgatgtggctgtctcgagcctactgagtacaaccggccagaaggaaagtggcgaaggacggagatgcctacatgagcaccgacatgagcccacactggcgctgtcaccgcggatctctcctcacccgcgggacctttcctcacccgcgggacctttcctcacccgcaaacctctctttgcccgcgggacctctcctcacctgatgggaccatttgcatagatttctgccatcatcttctccctcccagagagggagccgtagtctcccaccctccagagggtgtagttccggatggcgtggcactctttgaattcattgcatgtcccacattggttaaacttgtcacactctgggggagagcaagaaaagtcagcatgaggccgtctcctcatcaacccactgacaaagaagcccgccaagcccactctccactctcatcatgcagcctaccactcagcagctaagaacggaaatcatcttgctattaggtgctgcttaatgacgctcttctttcagctgccagggagttatgaaaagcccttccccaggccttggcagagaagaaaagagacagacattaattagcacatagtaggcacccaggagttcgcctttttcctctaatggctggagaaggacctttccacaatactttctagctgaaaatggagcataatcaaatgattagcacttaataaaatgtctctattgctggctggtgaataaataggccaatactttgggtaacaacaaccacaaaaaagcattttcttctgtgcccacgctgaggggaccaaaaaaaaaaattctggttatttcgacttaagaggttatcaagaattaggcttaaaaaataaaataaagagggccaggcgcctgtaatcccagctctttgggaggccgaggtgggtggatcacctgaggtcaggagtttgagaccagcctggccaacatggtgaaacccctgtctctactaataaagtacaaaaattagctgggtgtggtggtggatgcctgtaatcccagctactcagtggaggctgaggcaggagaatcgcttgaacccgggaggcagaggttgcagtgagccaggatcgcgccattgcactccagcctgagcgacaagagcgagactccgtctcaaaaaaaaagaaagaaagaaagaaagaaaggacaggcgtggtggctcacacctgtaatcccagcacttcgggaggccgaggcaggaagatggcttgataccaggagtctgagaccagcctggacaacagagcgagacctcatctctacagaaaaaaaattttataaattaatttaaaaaaaagaaaaagtacagctctcggttttgcaaggctcagagtcactgtgttcccacttttcactccatccacacggcggccctcggcctgccattcgctgctttggcgcgacctgtctgtcatagttacacatctgtcgggattcctcccccaggaacatgagcaccttgaggctcagacactggttcaatttgttccttgcacaccaagtgcccagtgcccagtactacgggaaaatggtggatgtgtggccacacttttgctaacactacaaagatgactatttatcgcaatcaggtttttttattcttttcttttcttttttttttggagacagagtctcactctgtcacccaggctggagttcagtggtatgatcctggctcactgcaacttctgcctcctgggttcaagtgattctcctgccttagcctcctgagtagctgggattacaggcgcatgccaccgcgctcggctattttttgtatttttagtagggacagggttttaccatgttggccagtctggtctcgaactcctggtctcaagtgatccgcccgcctcagcctcccaaagtgctgggattacaggtgtgagccaccgcggtcaccagtcacacaatcaggtttctgatgagctccatctgctcctgtcaggctgggtgggttggaggggcctggcctcagctgggcgagagcactttggcgtggagtgggcgtggccctggagaccacctgatacctgcttcctgcttccagagccatctgatagcccttccctctgcaccttccatctgtcccccttctcgaaggactcactcagccagtccaggagaatttctggctgaacaataaggcctgagaggcaaggcaagggagccccgttggcagagggtggtgcccagaggaccttctgccacttcagagtgcacagggcgctggggccagcctatatagcctggggcaggggtggaggcagcaaagcaagcagctgctgggctttcccagctctctgctctggctgtgagggagatctgagtcaggtggcttaaaactaccagttatggccgggcacggtggctcacacctgtaatcccagcactttgggaggccgaggcaggcatatcacgaggtcaggagatcaagaccatcctggttaacacagtgaaatcccgcctctactaaaaatacaaaaaattagccgggcgcggtggcgggcgcctgtagtcccagctactccggaggctgaggcaggagagtggcgtgaacccgggaggcggagcttgcagtgagccgagatcgcgccactgcagtcctgcctgggcgaaagagcgagactccgtctcaaaaaaaaaaaacaaactaccagttatggccgggcgcagcagctcatgcctgtaatcccaccattttgggaggccaaggcaggtggatcacttgaggttgggagtttaagaccagcctgaacaacatggagaaaccccgtctctactaaaaaatacaaaagtagctgggcgtggtggcgcatgcctgtaatcccagctactcaggaggctgaggcaggagaatcactcaaacccgggaggcggaggttgcagtgagcagagatcgtgccattgcactccagcctgggcaacaagagcaaaactccctctcaaaaacaaacaaacaaacaaacaaaacctaccaattatgggattagggtctggacttttctttccttctgtttctaatgggagcagcctgaaaggaatgtgccagctctagggattccaggctagcttgggtctgctcatccacacagcacccccttggccgtagccgcacctgaatgtgggggacctgggccctgggtcaccagaacaggaaccaagccaatggctccttccagtttggggcagcacctccccacctgctctccaccaaagctcctggaaaatgaactctccctccacaaggccccctacacctctcccctacaaaggcccaaaaagccaccaaaatgccagcatgtcagaactcaaacaccacattcaggcccagccaaaggggcacaggagcaagacactcttccacgaggctggagacatggggacagggccggtatttttttttttttttttttgagccgtagtcttgctctgtcacccaggctagagtgcagtggcgcgatcttggctcactgcaacctctgcctcccgggtcaagcaatgctcctgcctcagctgcccgagtacctgggattacaggtgtgcaccaccacacccagctaatttttgtgcttttggtagggacgggatttcaccgtgttggccaggctggtcttgaactcctgacctccagtgatctgcctgtctcggcctcccaaagtgctgagattacaggcatgagccaccgcgcgcatggccaaggatgctcttcagaccgctcctgcagcaggctttttcgttgggcttctcaacagggactacggggtccagttttctgatccccagcccaagcgggtgcaagatagcagagggggcttctgcagcgagaggctggagctggcactgggaacactacccctcatggtcaagagcaccagcgcccctgggggctgcaacctctgccctcccgcagctccccagccaccagccaatgtgaggagcacggggtcaggctgggtcctcagccacgaaggcctgtggaagagggagtggagggcaggagggtggagtgggggcacgggcagcagcctaccctggtccttggcctggtagttgttgcaggtctcgtcagggatgccgtgctggtgggcgtagtcccacacggacaggtcattacccccttcacaggagccagcgttaccgcagtcgatgacgttctgcacggacaggagggtggagggccacgctcccttcctcttgatgttgatccgatctgcaacagtcagcacctgccagtcagcactcacccactctccacccacttccccgaacggacctggacgcctcaggcgggatgcaggcgctgcccagcctggcctgccttcagctctgcccagctgcctgtgtctccttctccctgctgacctcttcatggaggtctccgctcagacgtcgctctgcagagaggcctctcctggccttctttgggcactgtcctgtctgccacacctcccgctacaaatgccatgagagcagggccagggccaggcggtcaccagcatctggccctgcagacacctgagaagtgcctgctgaatgaagggctgaatggacagagactcagccacccatggcaagtgggccacaccccaaagccagccaggagagaccgtccctgccctcgtggacagggggccaaggtgtcagctctgtgaacgagtatagcccagggagccgcatgagccccagtgaggggccagatgcggtcctgagggctggggaaggccagcagggacccagccccgaaggcactgggggatgcagagggctcccagcggctggctgaccatgccctcactgcccaggtggctgggctctaaatcccaaggtgcagccagggacagctcagggtggtcaccgagggacctgcttcccttcccatgcacaaatgcaataaaacagatcctagaaggaaatccgggcccatgttcagggtcatctcactctgccctcccaggacaatgatttcacagccacacacccctgcacctgcctcaggcctcatctcctgaccccacgttcaagtcggaactcttcctgcagcctcacctgtccctcccccagggcacaatgagcagggagtccctctgcccattggcagccccctctggacctgcacatcccctccatctcttgtcaccttccagactctcccacactgccccacagtccgctcctccacctggcctcctcccggtcgcccagccaggggccttctggaactgtccctgctctggtgacttcacgcatcactgaaaagtcccaaagcagacctccatcctgccgccacccagcctgcccatgctctgcaccccaaaccctcttcctggagcagccggtggctggtttgtcccctcccacctgaccgacccaccctaggttccatcctgtttcctcccaaggacttggctccctccagctttccttctccccgctcccttgtcagctatgccccctctaagcagatctgcacaccccaaacttgcctttctcacaacaacagaggaagcccccggcccctcccactcactatcacggttttctgcttcactcaatggtttgagacagtgccccgacccctactgccccgctcctcttcagccctttctctcttgctaaaggtcacttctccactgtcatccgagctgaccactctccggcagcagtcagcacagcggtcgctccatccttctggaagcacctcctgcctgggcttctggagttccacttggcagtgcagggcgtcccatggcctgcccccgagccctatccttctatgcccaacccaacccggcgacagcagtcctggcccagaggcagagctcggatggatgagcagtttcggttctggcctctccgtctactcctgcctgaagcatctggacccggcctaaccagctcactgaggtatgcacaagcttctcccacggccaaactcaatccttcatcccaccagccccatctgggaacgggcttattactcacactgtgggctaacacaagtgtcctgaatacgtttaatgcagacaaagccaggccagggtgtgcaggaggctgggtgtgtcaaacacattttccactcatggtgttttcaacttacgagggggttgtcgggacatgaccccacagttaagtcaaggagcatctgtaactgtgcaaagtctacagcaccatgaagaaaaataaatccgggagataattcaggaagtggggtgtcatatgcatagggtggctgaggaagaccccgctgaggtgacatccataggagggagggagggagccatgggacctcagggagagaggaggtgcctggtgggagaagctacctccctgctccactctccgcaggagcaggggagcaagggcggactgggagggagcccgatggtgaaggctcttgaaggccagagggttctgtcttttatctgagtggaatcctgagagggtttcaagccaaagaacatgttctgatgggttgtcacaggctcactgtggcctcaggggcagaggccaggagaccagtgagggcagtcggcagtggggcggtgtggcttagacctggaggaggcggtgggcggtgcgtgatttctgcatctgcttcgaaggtagaaccgacaagacttgtgggtggattatatgagggacagaaaacagaggagtcgggtaccagtccaggcttttgcctgcatagccggaaggacagccagggaggactggggaagaaatgggctgtcaggtgacagtagtggaaggagccatccagacctgaaggtctgaggctggaggtgtcaggtgaccgggacagcgggcgagtgggcaggtggatgtcaagctgagttcaggtgaagggttggtcctggggaagctgacactcagaactctgaggagcagacagctggggagaggggaaggagtggccagggaggtggaggcgggcagtatggtgcaggagaaggaagcatcctggggagacgtgatcaggagaatgcttcacggtgggccccaggtggcagtggaaagaacagtgccggtggagtggcagaggtgggactgaggctggagtgggttcaagggtagagaagaggaagtggagggactccagatacttccctagggagcccagaattggggcggggtggggccgggggctttgtgttccttttttccaggtgggagagcttccctgagtgggaagggacgggctcagtgaggggacaagacagttgatcctgggggagaggagggaagacaaatggaggacctgctgccttggctggcaaatggccagggccccgtggaagtccccttctggtggcttctattcctcagtgaaagaggaagcgagtgcctgggcctgggtgcgctgagaaggaggtttcaggagaaagtggggtgaagcagtcatccgcccagagagagtcccctggggaaatgcggcagggctgacccctggccagggtcccacatccatctgaaagccatctcctttctacccgcagtccttcacagacgcacatcttgtcacctgactccctctcaaagagttcaaggcttcccacaggcacctgttgacctttctattctcccctcaccctcaccccaccctcaaaggctctttcacttcctcagcgggtgccaggcctggacacttcccctagactctgcccagtcctctgcctctagccccacccacaccctgcagcccgcccaaggtctcccagaccttccagctccatccacatcaaagggacctttgaacgatcagaagtgtgttccagcccccgggggagacgccacggatgccacagcttcagctggctggctctggggtccagaccctacccccagagcaagaacccctcattcacaagactgagcccatcagacatcctggcacaaagcccaggcttccgggctcaaatctcagctgtcactcacactatgctcaagcctccccatctctctgcaaaaagcctgcttcctcatctgcaaactggaagcaatcatggcattgaggaggcgtcagtgagatggagcacacgcaaacgcatgtcccccagccttggcccacagcggcagccacactgtagtctatccttttcacatgggtgtacagcaggcctgacccatgaggaccaaggccagggaagaggcaacagcaccacagtgctcatgggccaaactcccaggccacgcaagtcccatctccaggggaaatccaggctcctggaccctgtgctgtgactggagaggggatagcagagtcccttccaaatgctgtggggtgggcctggggctggtttgcagctgtcccttctcccgccttctctcccaaagcagggtgcagcagcctcgttgatagggagggccttagtttccccttcctctttgctaagagcctccctaccctactcctgccaaaagcctaagatagaaacccaccaggctggaggtagtgaccaggttaggccatgggctgtagccaactagcctcacccaatattccaagcccaggacaggctttcatctgtgctgagaagcagtttacttctgtatcctcaaatacagcctggggactcagtgattttgcatttctgtttctatcccaatggctgaggtcacaagctttgggggagagagggcacctggcagccacttgtcactgggattcagtcctagtcctgcctgtcacccaaaagccccagaatgacccagcttgggtcacctcagcagagggcaaaggcccgcgctcctcggccttagcaccccagcccaggctgacctggccttgaatcacaggcccctggaaccgcgggctgagctgcctgggcctataaacaggcagccgggatgggctttcctggcccacagtcaaagggcggccactcacccgccatagcgctggtgctggcgtgggcccagcaggagccgcagtattgggggatgtgctggttccgggtgatgctggcatagttgacaccatccacattgcgccagtcccagctcttgggcagatccgctggggacaggtactcatgaggccgggggtatgtgctgagaagagatcatccccacccagatcggtgctggggctcccgggggccgtgggcccaggaagccctcggtagggccctcccgcctttcccaacacctgagggcatgggagtggggccacaatcaccagaggtgagccaggtgtgggcccacctcacactaggaggctccagcgctctcagaatgtgaaggaggcagggcacccccgaaaggagggaaccgggttgctcccccagccatgccgcgccgtaagggccacccccagaggccgaggaggtggggctggcctggctttctggccaggtggggcttgtccaaccccacaaacatcagggctcaccctggatgtggaagagaaggagcgacccccaaaacgaagcggctggatctgaccttccaaggcctgttggcgacgcagggcccccaggaggcagagcgcgcgcctggcccgggcgatgggcctcccgtccccccagggctgcctccccgccggtgcccacctgcgccccagcggagccagcccgtccccccgcagaggccggtagcaggtctgtccccggcggaagtagaggccgccctgcgccgcgcccgccagcagcacgagcagcagaagcggccgccaccctggcccgcgcctcgccatggccccgcgccggctcctgggtcccgctccggatcccgctccgagtcccagatcccgcgccggctcccgctctggatcccgccccggcctcggcctcggcccagcacccggccgaccccgcactttgggcccctgccccgcccggcccttaaggctgcggcggccaggccgggacactcccccggggcggggctgtcccatcgctgctcctgccccgcccggtgacccctgccctccccgcccggctccgcgccccgctccctccctggctccggggcacctgaactcgcgggccaggcgcgaggtcgccgggcagaccccagcctgaccccgccgccggccgccgccctgagcgcgggactgtccggctggactcatttgccggggttcctggcttcggggtggggggccgcaggctcatgggcccccttggccctgcattcctggggccctgagccctggggagaggcccccagcctcacatctgggcccaggcctcccctaggaagggatcctgggatgcggccaccgcccccaaagaagggtccccgcgcctggctttctaaaccccttttcccaaaggcccaggccctttcggggggacggttcccttttgcagagaaggaaggagggatccttctagaaaatgccccaaaggaagattccacttggcgcaggcatcaggagttatccaatgtgacttccaaagacgccttgaaaaggttttctgctaacgaaactcttcttagtcaaatgaggaaccaaaagcagaagtggccccccaggacgtggttttgtaactgggggagggcttctcgctccctgcggcccctctgtttgtcatggcccttgggcccacaccatggccttcttctctggtaagaacagggcccggcattctgggctgcgacctgacaggcccctgctgggggcccttggcacagggcccacagatgagcttgcctgactctctccatactcagtggcactcaccacattccaagcgtgccacgtgggcaaggggaagtcacagtggctgcctcctgacttccagaagcttccatgaccattcccggaagcgctgaggtggccatggaatccccgcatgactgtccgagtggagagcaaggctggagagctgcttcgtcagcccagaagtttcagtccttgttccccaaaaagtggtcactgaggcaaagtgtggccccggggctctacctactgatgtgtctcttatttgtttggcaagtcgctcatggaaaccattagtgtccatcagtcatcagaaggcggggtggggtggccatcctgggagaagtccccaagcttgagctggcggtgggggtgggagcgaggcctcccaacctctgggcataaaaggagtggaaagagaattgccaagagggggcctttcttcctcccatgtcaaccctctggcctccctgactataggagctgggtccttgtgaggaagaaacccagacacagctgcccttgccaggtcatcaggtggcatctaccaaagcggccggtttttggcttcttctaaagaaaaagctaagaactcacaaaattgtgtggtaagagatatcgtgcccctccctccaggtacccatagttatgatccaggtactgtgaagtccaacagcacattctacagcatgagaaacaagcctggagaggggagggccccttgtgcttggcctctgatgcctgagctgtgatgtcctgggccctggtccctgaatctgggtgaaaaggcacccaaggtgtaagcttttctttcctgtagcatggggagagctggggtgctctgaagatgccccgagactctccgagcaggtccagcgcatgtagaaggtatgacaggcatggtcagcaaggcaggcacacgacccctgcagtcacatgaggccctaagtccagaagtgtaatgcagagctgaacgaggggctctccaggttcactgtgccctgggccctgcaaattatgtagctgggtctgatgacagcaaccacacctgctccatcacaagtcctgtacatcacccgctttcagcccagagcctctggcaaatcaaactcacaaacaggggtcaggaggaggggtgagatggtcaggaaggggaataaacattcacagtcctgctcccaaatgctggcacaaagcttaatttatctggggagttccaaagaggagactctccggatttaccctattgaaagttggttaaagggaaggatatttttaggctggtaacaaaaaggacgtccaaagttgacaacttgtgccccctgggtttccctaacatagaagcaattcaagatcagaatctgatggaatagggcaggaagagagggagggagcctatccatttgaaatcatcatttactttttcttttctttttttttttttggagacagagtctcgctctgtcacctgggctggagtgcaatggagcaatatcggctcactgcaacctccacctcctgggttcacgcaattctcctgcctcagcctcctgagtagctgggattacaggcacacaccatcacacctggctaagtttttgtatttttagtagagatagggtttcactacgttggccagactggtctcgagcttctgaccccgtgatcctgccgcctcggcctcccaaagtgctgggattacaggtgtgagccaccgcgcctggtctgaaatcatcattttcaagccaagaaggaaggaagggggcctgatgagacttatctctccagcctcttctcatgggtccaacacagcaaaccacgcagagacagggctcctcatctctgaacctggccctagtcgagtggatgcatgtctggctgccagactgctccgagaagctggcgggctgtgtcattttgggggttactaaaatcgtgcagcagaggatcctaaataggatttttggttttcttggttttggggtttttgttggttgtttttgtttttcccttaactcgatgcaagatcttaaacatgttccttgtgggggcggggttggggatggccacaaacccacccaaactcaaattccagtgctgctattagtgaaggatgtttagctggaggagttctctgaagggcacacagataaaaccaggaggtgtctgggactggaaaaagaggagggagcacattgggaacctgatagacaggccaccccagccatttcttgctggggactgcttgctgggggttgagtttagccccagagctgtgtctctctcttcaaagcagactcacctgcagagcagcttggggactcttggaaaccggaaaggtgtttcctcctgacttggctgcaggtgcctgcaaggtggttttgtggatactgactcttcttctcatctgggccgggatccgaagaggcttggggcagggcacttggaccttcctacctctgaggccctacttgcctaagcattgcttctagcagctctttataagcagctgtgtgccaccgccttccagcttggggcagaattgagtaggtatttagagcaaggcgtctcccctgaaaccactttgcctggaaagcttggcacctatcctgggttttccttcctggaggtaatggagtcattcctgctcccagtggtgcttgagggcagagggctgagccaatgacattctagaggactgtgcagccgcatttgatcctttgcacaatgctgtgaggtgggggtgggggttgggaggcagatgctattactccattctactggcgaaaagactgagcctctggagatgtcaggtgacctgtgctcagcacgaggctcctgggtggcaggttccaatccagtccctttttttttttttttttttaaccccatgaattctcctggaaaacacatgatccaaggccacagacacaaaagcctattcatttctaaaaataaggctgatttttctcctcattctgataaagatcagcactcaggccacggctggcccaccttcccaacctggaggaggagaacacagatgagttttcatcgactgtggaatggcctcgaaatcctttttcttcttcctttgtgccatattgtctggcttccaccccggcaagctgcagacatttcctattattccacattcctgagtttagccacatcctggataccggcatttgtttgggtggatgccgacaatgctcgctaggctaggctggttttgcagggcacgacggttccctcaccagctacaggagttcctcttgatccacttggtcaacgggtcagaggcactcgctaacacccagatatctctgcagtgcaggccttcagatagggcgggccaggtttgcaatccaccatgccactgtccccaagcaccaccatgcatcacatcctggcctggttgtgttatgggaaaggggatcccaacccagatcccaagagagggttcttggacctcacgcaagaaggaattcggggaaagtccataaagtgaaagcaagtttattaagaaagcaaaggaataaaagaatagctcctccacaggcagagcggcagcacggggtgctcagctatttatagttactgttacttcttcattatacactgaacaaggagtggatcattcatgagttttttggaaaggggtgggcaattccaggaactgagggttcccccgctttgtagaccatacagggtaacttcctgatgctgctgtggcatctgtaaactgtcatggtgctggtaggagtgtctcttagcatgctaatgcattataattatcatataatcagcactgaggacaaccagaggtcactttcatcgccatcttgggtttggtgggttttggctgccttctttatcacatccttttatcagcaaggttttttgtttgtttttgttttttgagacagagtttcgctcttgttacccaggctggagggcaatggcacaatcttggctcactgcaacctctgcctcttggggtcaagtgattctcctgccttagcctcccgagtagctgggattacaggtgcctgccaccatgcgtggctacttttttggctttttttagtagagacggggtttcaccatgttggccaggctggtcttgaactcctgacctcaggcgatccacccgcctcagcctcccaaagtgctagtattacaggcctgagccaccgtgcctggcctattggcaaggtcttggtgacctgtaccttgtgccgacctcctatctcatcctgtgatgtagaatgtctaacctccaaggaatgcagcccaggaggtctcagccttattttacccagtctgtattcaagatggagtcgctctggttcaaacgcctctgacagttgcacagtgactggtggtgcacacttgcttgggagtggatgtggctccttgggctgacattgatgaaggcagcctcatcagtatcacctttgggacacaccctgtgcagcacagcatgtaacagacacagcccacccatgaactcaccaggaagtctttcaaaggggcactcaatgactacccgattgaatttgtttgccctctaaagttaggctgtcagcaaatatttgttgagcacctagtacgtgcaggctactgttttcttccccggggattcggcagtgaacaaagtccctgtctgcaaggacttatgttttctgcataagggaacatgtggaaaagtaaaatgctcaggaggtaggaagtgcttgcaaacagttaaaacggggaacaggagagacggagggtctctggagaagtttggtctgggaccattcttttaggtatccagtgagttgggattgaataatgacagtcatggaaggtgctggaaggagactcagcagaaggaagagtgtctgcagaggcctgagaatgtgagtgcactgggtaagtgtgtgatgcactggggaaagcccttggggaggctgcggacaggtgggctcagcctccaagctgcagggaccatgcgggcactcaggccagcttcacacggccagcccacctctccccttccctcccctttctgccatctgacagaggctctgctggcctccttcatcccccacctaatttccctgcccagcgggtttcccatccctgtctcatggggcgtgtgcattttggaagatctgaaggcacacatcggccttccttttgtaagaggtttgggttttctcccggttgccactggctttccaggagggcagtggctgagagctgatttctgtttgtaagatccctctggtgactgtgggaaggatgctgtgagtggagtcagctgtgggacaggaagggccctggaggggagagccacaggtgatggatgaggaatgctgtttgagagaaggggagagtagatgcatcaggacatccacctgggagcaggacttgcaggatgcagttacagagtgaggagcaggggacgtgagcaccccgggctcctggagcctgcctcttggccccttgaattgtacccctggatgtaggtgtctgaggacctgcaatccgtttctggttctgccacattatcctgagacttgaacatgtcaattcctctctgagccttagtttcttcttgaaggtggtggtgtcatgcaggctaaacgagggagcatgtgggagacggtggcggcggcagagaaactggtaaagaccggcagagcgggaggctagtgctgctttcaccctctaagtccctggagggcagggcccatattttctacttttctgaggtccctcaaaactaatatatccgagatttcttggacaaacactgggcttgaagaagtacatatttttgttcaatttcagctccaggtgctgacccattttatgcttatctgttcatgccacagaacatcgcttatcactagctgcaacttcgggagacaggaaagatgcaagtgagaaggttcatgtgtccatctcttagatcttcgcgcagttcaggggaagtggtggtggtggtaggtgtgtgtgtgcgcgcgtgtgtgtgttatctcctgtaaatcagagttgccacagcctgcatgctgctcaccagtgcacctggagagacagcaagatgtttccaccctctgggcttggaggctggacaggtgtgaggagcagccagagtctgcctggtacaggaaccatgagcatctcagctgtgggggaagaaggttaacactcctggctcagcgaaaaccagcaatgtcctcctagtctctctcctcttgtagttagttactcatcctcctagaactttcttttccagtaagagaacacacaccgagcagggtacaagaaagtggagctcagctcctctggcgggctgcctacacccgctgagtcacccataatggcccctcagatgtcattttcttgctaagacatttggaaaaatttcctggttctaaatcacacgcaaacagtataattcaacaatcttctctgagttattcagggaacttcaacgcactcagaagtggaagatcggggcggatgaaatcaatgaattctctgagtgctctgtttttctctgaattctatttcatttgccaaatggagggtgggggcagctccatctgacccctgggggataactcctgggggaagtctggaagcagccgattcggggtttctgggtgacactggtttttcttatcttcccggttctatttctgtaatagacgcaagtgtcatgcaggaaaaggcttgctgctgcggagccttctgtggatggctgtgacaggccactggaggagagggtttcaggctcagggctgggctggtcctggttgggaatctcagtgttgtgggccatagcgtcctcaccacacttgctaggaggaagctcctgccctctggggcaatgcttgctgatctcctcacctaaatgcaggcactgctaacctgccttggtcacagccctttgttgggggggcagaaaacaactttgtcactcatcacagtggccactgtgaatcgcttgctgcagctcaggacgggggccgtcaccttcagcctggcaaaacagaccttggggtcgtgccggcatctccaggggcagtgttcgcctatgtcctgcacagggcccgcttctaccagtccgagggcaaggcagactgtattccccacctcactgctggcactaaggtggcaatcagaggagagctgtttcctctggggagcaggtaccttcagaaacaaggacaagagagctgagacgggacgcacggctttccagacctgctgcctttcctgccactctgttctgcccagacattttaaattgagacaggccccgatgtccacggccatgtcaagtctgccacacagtaggtgctccgtctgtaggtgtggaatgcatctccccctcccaccctgcgaagcccacttgaaaaataccaccggcagccacacgttaggggtcagccctggcaggcccagtcctcacaccgacttgtgacgtggggacttttatttcatttttcacgtgaaaaagttcaggtctagggcggagatgggcccctgggtggcggagctgccactccgtccctcaccctctcacagcccagcgtccaaagctcagcactcgcctggcctgaattaacatggccggcgatacaagaatcaaagcaaacagggcttctctctttttcctcctttttgccaactgccccattaacagaaaaaccttttaagcgcccacctggaaacctggctttttcccctccctaagcaaactaagatggccaagaggaatgtgctgcagtgcggagggtgggcggaggaccccagcagcctggatcctgctcacatggcaaacagtgaacccaggcagaccagaaatgccccttgggcccagccccgtggtccctgcagcaaggcggtttgtggccaacaggggctcctttcaggagctgggccacagaaggccacggctgcccaccggtcacaccttcccgtaatagctcactgcggttattccatctatagtctgtccccaacatccaggtttcttggaacagtttatatctccagcctagaccacctcttatggaatggaggaaaaaggtgaccccacctggagaaggacacactcgtgaataaatacatcactggctttaagaacacagcccgctctgagcatcactgctcaaacctgcccagctgtcagtgtgcccttaacaaacatttactgaggccctgccatggatcaggcactttggggactcaaagatgaaacgacacaggcagctcccaggctggcgggagataaggcatgtgtataagtaattagcaaacaggactgtgtgtgggcactgcaggttgaagtgctctggtccccaggagaggaagtgtctctgatgagggacctgcctgtgggaagatcatggagctgtctttgatcttcggagaagtctggtaggcaggggcccctgggtggggagggaggctcgggagagctggtggggacagagacaaggggaaaagaggccaaggcacgccaggagaaaggctggaagtgaggcaagatgggctaatgtctatggaaacagaatggtctattcttaattttaaaatggtctgttttaatttctgaaaaatattgctggggacctatgaataggtctgttttaatttaaacagatcattaataaaatggtctgttttaatttctgaaaaatactgctgaggacctgtgaatatcctcctcttgaatttgcacattcttctctttacctttgggcagggaggaggggtgactggaccggaagcatctgtgagtcatgtgacattcaggtttgagcacaaaaaagttccaaacttagagaaatgttacaagggtattaatcttgtgctaactttgaaaagaaccagcaattgttaccactttgcccctttgctgaactgccctctctccgtttatcacgttatgtggttgtggaactgtttcccagtaagctgccagcatcaaaacgaccttgaagcacagtgcttcataatatgggatctcctggaaacaaggacttccacttagaaccaccctgccatgatcaaagtcaagaaatggaacactgatacaatactattttccagtgtacacaatccttatttgaattttgacaatgatcctcataccatcctctatagcagccctcttccctggtcctggatccagcccaggatcatggggtgcactgtcagtactcaagggcagcctgggatctacacactagacagaggtgagaagcagtcccagtccaggcactcttaggacacagtgctttcttcttccccacctctgggtttctcttctggtttatagctcaggccctttggctgtgtgtttgagctcctttgggagtaagcagaagcgatttcccccagacactccatcgttaggaactttcctgattgtgttcctgacctcacatcctgggccccaccaggcctgtagaaggaacacaaggtttaggagtcaagcctgggcttggggcacaggaagcacaggcccctcatggaccaggctgggctccaatgcttcaaccaaggtcacgggtctggcgagaggcaggggagggaaggacctccagggcttctcgctctgagttcagtagtcttgcctgtcctgagtccctgtcctgagagatggtgtccttgagctgctccagagctaggagtgctctcttcctaagtaagccagagttccaagagtgcaggatctggccacatctacctccttcattcccttgtctgcagcgcccaaggtgagcccagcctatgacaggtccccgtccatagctgttcaaagaatgggggcaacctcagggtgcccggcagacgttaaagagaggcctcaagaggtggttgctcaccggatggtggttgtccacatcctcggggcttcaggagtgaggccttgccctgtacctgcccacctgcacctcgacagctcaacaggcacaaggcagcgtccactggctctccccttccgagccagggctctcacgccttctcagggagtcccttccccatcttccttggaagcttccaccttctgtcctccaggcggtggggaactgccaccctcctgggcaaggatatggagctggtgtttggcctggatgcccttgcctggttggaggtaataaagcctagggctggctttcgacgatgatagaaacttggtggcaggggaggtactgaggaccaggagacagaacagctgctttcaagctgctgagtacccagcctgctgccactcctgtacaccgcatgagggaatgcttttttttttttttctgacagagtcttgttttgtcgcccaggctggagtgcagtggcatgatctcggctcactacaacctccgcctctcaggttcaagcgattctcctgccgcagtctcccgagtagctgagactacatgtgtgtgccaccacacctgactaatatttgtatttttagtaagagatggggtttcgccatgttggccaggctagtcttgaactcctgacttctggtgatctgcccaccttggcctctcaaagtgctgggattacaggagtgagccaccacacccggctctaagggaatacaattgggagtccgttttgctcttggagaattcagggtctggtaaagggaccctatggcaaacattaagaccccagacaccatgagctgagatgggacgacagagcaggggctgggaagggtgctggggcacagcccagccctggcatggatagggcaggggtccaagagacctgcaggacactgcagagtaacttgcatacagggcgagagagggcatgtgggggagggcgggcagacagtgcctgatgcaggccatcccgggacctgggacctgcgaggcccagttgtggagcctcctgctgtggcggggcacggggcttctggggaccaaagtctggaaaaggggccgggaagatggacagggaaagcccttggaggtggtctggttacctgggtgagctaggagccacagtcatcataccacggtcactagggccagcatggtcacctagaagcctgcaaacagtgccagcctccaggccctgtgccccgaggtggcctttaatcttgcactcactctctaggaaatgatggggcagtattctgtgttgagggaggaaaaacactcccttccaaaagcatgacaggcagaaagcagagaagggccaggactggctgagggcggggagctgggcctctggggtggacacacccttggtcacattgtgagggtagcttggttggccagtcccaccactgcagtgaccacagttgtgttgggctcacaccagtgaaccgaagctctggattctgagagtctgaggattccgtgaagatctcagacttgggctcagagcaaggatgcgtgaaattgtccatattcagattggccagtgtggcaaccagatcggagccaaggtaagtaatgtctggttactaatcctagctttaccacagtccatagaggcggacaaccaaaaaaataccctaagttagcagggaagacaataagtctagcagatttaatgtacttgctaaatatcagacaatgcctttgggctttaattcttaaaaaaaaatttcacatgggaaaagaaggaaacaatctttaactaaagagctacaacacacattaagtgcttagagtgttaatttaattaatgttaattttatccatagatacatatgtacaatacatgccgaccattatattacataatacgtttatcatctttttctttgcccactctgttgcccaggctggagtagagtggcagaatcatggctcactatagcctcaacctcctgggctcaagctattctcctgcctcagcctcctgagtagctgggattacaggcatgcaccactatgcctggctaatttttaaatttttttttgagagacagggatctcactttgttgctcaggctggtcttgaactcatgggctcaagtgatccttctgcctcaggcttccaaagtggtgagatgacaggtgtaggccaccgtgcctggcacttttatcatcttttatttttttgagatggagtgtcactcttgttgcccacgctggagtgcaatggcgcaatcttggctcactgcaacctccacctcctgggttcaagtgattctcctgcctcagcctccccagtagctgggattacaggcatgcgccaccacgtctggctaattttgtatttttagtagagatggggtttcaccatgttggtcaggctggtctcgaactcctgacctcaggtgatgtgcccgcctgggcctcccgaagtgctgggattataggcgtgagccactgtacctggcccacttttatcttaacaatgaacttttcatatctaaaaacagtaatttgtctcaaaacagctttttgaagttttttgagaaactttctgtaccctgtcactatggtgtctttcccctcccctctcatgtttattgtaacgcttaaaaaaaatcaattactgttttattagtatgcaattgaaaatttaagaaatttaattgaaaataaaagttttttgtgtacagtaacataattaattaaaatacactgtctggaatataaatgagtttttctttcccttgcccccctgcttaaaaatttcccccaagtacgtaacttaattggccaaccccaagaacacagatgcccgaacccacaatctccaatcttgattttaagatgaccaattgcaccgtgcaaaatttatcgtgttctctttgctgctgtgaaattacttttactaatatgagatgcattaaaagtgaggttttgaaacacctacattcatcatccatcaatgacacttgggttgtttctgccttttggctactgtgagtaatgctgccaggaaacaactaaggcttttaaatgcaggcgttttaaaccgggggcaaggaacattactgcttgaaaagaagtcaccattcctccatgcctcaggggtaagacattcataactcacacacagagaagtgggaggcaggagccctgctgctctgaagctggaagataatacggaaaggggccctcaagagaaagtgttaggtttagatagggttttagctctcactctggaatcgtatggtctagcgttgagagtcctggctgactcatcatttagagatataagaactttaagacacatttaatttggggtatcttagaacttgaatttatttattcttccactccctgaacagtgctggcagtttaccatgaactgccttgttattaagaccatggccagagcagcactgtcatttagaagatatggctggggtttttaacatacccttggggattttaatatatgtgaatacattttcattgcattttaatatgtgcctttcagggtgatcaaaaggagtcttcccagtaactgtttccatattaagagcttggcacatatctatattaataagtactgtgtatgtgactggaagtgcagtatgtttcaaatagttaccagaggacaactatgtgtaattgtgagttgtatgtatacctgacaatcaaaaatgcacattactggccgggcacagtggctcacgcctgtgatcctagcactttgggaggccgaggcaggtgcatcacctgaggtcaggagtttgagaccagcctggctaacatggcaaaaccctgtctctactaaaaatgcaaaaattagctgggcatggtggtggacgcctgtaatcccagctacttgagaggctgaggcaggagaattgcttgaacccaggaggtggaagttgcagtgagccaagattgtgctacggcactccagcctaggtgacaagagtgaaactctgtctcaaaataaataaataaacaaacaaacaaacaaacataaaaaaataaaaaaaagaaagaaaggccgggtgctgtggctcatgcctgtaattccagtactttggaaggccaaggagggtggatcacaaggtcaagagatagagaccatcctggccaacatggtgaaaccccgtgtctactaaaaatataaaaattagttgggcgtggtggtgcgtgcctgtagtcccagctactcaggaggctgaggcaggagaatcgcttgaacccaggaggcggaggttgcagtgagccgagatcacgccactgcacagataagactccatcaaaaaaaaaaaaaaaaaaggcgctaattacttaaaatcatgcacagaggtccaagttatgggctgtttggaaaagttcatgaaaagaaatccccaaagtgaaatgagttattactgtgaaatcagataagaattcagtttattttcctttaatggaatctacactttactagcttggagcattataaggagaaattagagctatattgacattaaattctaaaacaacagctttaatgtatataatggcatgaatttaataggaggaaaatccaatttagtactttgtgtttgacattttatttaaggagttcaggtggggagaaaatgcaatcttcatattacttcacattgcttagtagaggcaaaaagcgaatgatgccatggttatttatgaaaaggccctaaaagaatgtcttggggagggtcaggcaaccagagggaaacaggcttgggaatgctaactttctctgtggttaacacagcctttttcggggtccgtttactctgaccttcctcctgctttcagttctgggagatgattggtgaggaacacgggatcgacttggctgggagcgaccgcggggcctcggccttgcagctggagagaatcagcgtgtactacaacgaagcctacggtaggactggcggggctctgggagcagtggtcccgcaactgggaacacaagcagaggaagggcagaggcccaggagatggaaatgtcaaagcagtgatgtctatgctcagggaggcgacaggcagggcagcaggatcctagagtggtgggtccccaagccctggtcaagacgcaggaatggggaaggagctgctggatatggcacacaccttaacacaagcaggttaagtactcactttcctttgtggtttcacaaatgaaaccaggatcatttccaatatgaaggaagagaatctctgtcactggcaatatcacagagcagactgatggagattgtttctgggtattctatagatttgtgggattgttgttggggtaaaaaatatgatgttagatactcaaatctcgacctaccaagggcccctttctagaatatccatgattttttttggaccagtatcacaaagttctattttgataaaacattaacttttagaaaaacaagtaggctgactttttcctatttttctacacaggtaggaaatatgtgccccgagcagtcttggtggacctagaacctgggacgatggacagcattcgatctagcaaattaggagctctctttcaacccgacagttttgtccatggtatgtttttccagaaggttccaccaggaggagggggggatgctttactggtgcccttctcttttcacctttcttcccctgctggtttctctttttggccacaggtaactctggggctggcaacaactgggccaaaggccactacacggagggagccgagctgatcgagaatgtcctagaggtggtgaggcacgagagtgagagctgtgactgcctgcagggcttccagatcgtccactccctgggcgggggcacaggctccgggatgggcactctgctcatgaacaagattagagaggagtacccggaccggatcatgaattccttcagcgtcatgccttctcccaaggtgtcggacactgtggtggagccctacaacgcggttctgtctatccaccagctgattgagaatgcagatgcctgtttctgcattgacaatgaggccctctatgacatctgcttccgtaccctgaagctgacgacacccacctatggggatctcaaccacctagtgtccttgaccatgagcggcataaccacctccctccggttcccgggtcagctcaacgcagacctgcgcaagctggcggtgaacatggtccccttcccccgcctgcacttctttatgcccggctttgccccactcacggcccagggcagccagcagtaccgagccctctccgtggccgagctcacccagcagatgttcgatgcccgcaataccatggctgcctgtgacctccgccgtggccgctacctcacagtggcctgcattttccggggcaagatgtccaccaaggaagtggaccagcaactgctctccgtgcagaccaggaacagcagctgctttgtggagtggattcccaacaacgtcaaggtggctgtctgcgacatcccgccccgggggctgagcatggccgccaccttcattggcaacaacacggccatccaagagatctttaatagggtctctgagcatttctcagccatgttcaaaaggaaagcttttgtgcactggtacaccagcgaagggatggacataaacgaatttggggaagctgaaaataacatccatgatttggtatccgagtaccaacaatttcaagatgccaaagcagttctagaggaagatgaagaggtcacggaggaggcagaaatggagccagaagataagggacattaactgtgagagaagctgtgccgcggagtcgcttacagaacagtttctcattagatgagtgtttctcctgcagcactccaaaacccactctgcactgcagcacagtgaatgatatgcactcaccattagcttcgacacagggactgagggagacaggtggggagcagctgacaggcattagggtctttgctgacatctactaaccttgaagagtttgatgttcagtgcatacttattaacttaaaaaaatagcaaatttattgtaaagtgctccctttgtttcaaagtgtttgccaggcatccagactacacgtgtggatttgcagggagccactggagttggtgttacatttttatactttagcagcactgataggcaccctggaatcctcacttggtatccgagggctactaagactctttccttaggttctttcctctgagcaaacactgactggcatcctgctttccagtgcctgccagcctccagaagagccaggtgcctgactagtacatggggagctacagagccaaggtcaatgtgagtcaacatccactagaaatatccatgttgtgtagacctgtgcatacaacatgctaactggaaaagaggaaaaaagaaaagccacagtcctctccacaaaaatacctggtccaaacaagaaaaacaaaaagacaagcaaaactaaagaactgcagtcttctgatctttatttctgaagagctagcctttaacatatatgtttatatagtttaaatttcttactactgttagatcccaggaattcattaataatcatccttggctttccttttaaaggctattttgaaatggtcttttcactttcattcagtcatcaccccccaaaatgctctgcagcctctctgctctttgagaaagggcacaccatgcgctcggcaaccattcaaatgcaggaattaagcagcaatggctgcagtgtccttctcagttatggaggacatcgtctcattagggaacttttacagttcaaattaatttgcagaagttgccataaatgtttgcataatgacatagctttaagcactacatgattttaatctgctcacattataacaggaccaaatacacaagagcgtaatcaaatcatctgtaacttcttaattacagtttacctatttctgacatgcagcactgccatctcttccagcaccatcagggttttaatggccctctagaattaccactgagatacactatttgatccatggataaccggtaatgggaaaatgctccgaccctcaatgcagtaaatatttacttgcaggcaactgggttctcatctcttgatttgcttttgtaatcagcaataataaaatagcaggtagatggatgacagttgctcattctgagaaacttcactcttttcacttatgcatcacgaggaaataactaaaatacataccaagagaaaaataccttgccatcggatcatcaacaagtcttctatttacaaacttcaaaaaacacaaaacaacattcatgttttaaatgctttctacttgtggttcaagaagcactagatttagtaagaaactctacctatatacttagtttgaagttagtaacttcctgagatgctaaagacttacagcctgcgattatacaaggatttacacatgcttcctctggtgctttacttcccaaacctaaaaaagcaatgaaatagatgtaaggaaggagggatttaaaccttttaaaaaacttttgctgacttatattactgtaaagatttgtttgctcaatagtaatcattaaactacaaagtaattcaattttaaatggcaaaattgctttatttcagactaaataaattccttttcttgaagcctaaccatccagactgagtagttaaaaatatttagaaatgcatctcaccatcctactctttcgtatggtagaaatagatgtaaaaacacaaaacaaactagaaacttaagaaatctgtcccttttgattttgaagagcttatcctttagcagtacggttgctccagcgaccttggtctctcagagcagcagcatcaccgaaatttagagcttatccgattccttcactttgctcacaagaacgatgtgaactaagagattaactgacagcttcaaacatcatccaactaattagtgggatactcattaagttggtctgactggggtcacctcatcactgggcacagtcatcctgccagctacccagcactgctggaggcaggaagtttattatactactggtttaggatttttttttaatcacggagaaaagagcctctaagaatctctgctgacagtaaacttgtcttttactcagtgacttcactcctttccatatcacaagccctgtccctaagtctcacctctaattaccccatctgcctccttaataatataccatctctataccaataatctaccaatatactaccaatctactatgccatctatataccagtaataccccatctgcctcaacataccatataccaataatctgccaatatactaccaatctaccataccatctatataccagtaataccccatctgcctccttaacataccatctatataccaataatctaccaatatactagcaatctactatgccatctatataccaataataccccatctgcctccttaataaatgacttatctctaattacttgactggaaatcatttagcccctttgcctattagttactttattcgtcccatgtcaaaaaggcccgatagctttttgattcatttattcctgttccctgtaatggaggatacttcctagtaccttaatcttgggggccacagcactgaactgaggtgccctaacttgccaacagcaggatgacagctccgaggcggaggactccaagggctcctaacctgctgttttccagaggcaccctcttccactcaattggctctgcctccctgctcgctctgtgctgagaattcagtaaaacctacaggtcaagtgtcgggacaataagtcattcccagaagccgagaacaaagatgttcttttcggcttatcctcggcattgctgacagtggccctgataaatcattgtgagcttaagtaccatgtgagaactgatcctagaatggtgtttcaaaatttccagttcaaatttatttctccagtctccaaaaacagttaaaatcaggcagttaactttgcaatggtgttttacttgcccaagccctttcaagtttcaaagaaagataaaaacataacttgcaacaatttttcatccctaaataatgaatgaatgaatcactatggaaataccacgaaactgctgttgtggtcaccgtgtcccagacttgcagtcaaaactcctaggttttaatttcagtttggccatcaactcaatgagcaagttattcaatagctttgcctcatttcctatgagaaatgctaccagagtataaagattcatttacaaaacaatgtgaaaaacactttgtgcttaaattctgtaaccgttcttatctataggctttaagtgcacaatacaaaacaagtacaatttagtatttcttcttctaatctacacttttagtatttaataattatttccatttgttactgataaccatgtcattattctgacatgacaacaattcaaaaataagggactacgaagcctcaatgacagcagataattttgatcaccaattaatgtcatgaaacaactattttgagacattttcaaaatgctttctgtatccctttggtcactaaatattaaatctggcttcccctgcttttaagaaaccctggttcacatggccataatcatgcagctgtgcagacagttcctttaaagaaaatgaaaaagtctcacaaactaaaatcaagagtaacagtgaaccatatttcaatttattgacattgtcaatttatgaacaagacaggatttttttttttcccatggaatgagatccttttcaatctgccataacatgtgcccacacatcttcaccttggaaatgtagcatttcaagctttagtcagggtctaggaggaaaaagaaaatgcaagttgctggctagttctctgtgttttcttaaaaactcaacatgaatataagaaataacttccttatagtgaactgtataactgtggctatcattcacattgccgtggctcagatgtaaaaagtgctggttcaagtacacaggcttagtcaagcaggcattttcctgctgagtaaaagtaaacactctcccagaataaagaaactactttgcctttaaaagacactaacatctccttgtgctaatgaggtggggtctgtaaccctgaagggcataacagagaggggctaatgctttgtttaaggggatcggacactacttcctgacccccaggactttgcaaaatctcagcattagatgcagtctggcagctctgagccgagtgaggctaaatgattttctgttagcttactgttaaaacaaaacaacccaacataaaaccaggtctcattactcagaattatgagattagacagagagcccctagaaaaagggctaaattcaaaacactgcatctccagacttgtaataaaatatttactaattcaaaatgaaaatgaaaagtgcttaggggagacagttccaataagtaaaattgctcataaccataagctgccaaaggattaatatttatcacatttctgtgctattatgggtctgaagctttttaaaagcaaaacaagaaaaattaaatctgaaaaacatctctctgataatttgccttgcctacttttgaaataacaatgtcaagaaagtactttagagatcaaaccacttttataatgtggaacacaaaagtctacacttatcaactgtacagacctttttatttcacgagaatttaactttacatcaccaacatctttggaaaagtaaaatgaaccaaaccctctgaaagcataataaattagcaaaacagtattcgctgcggggtcttgcagattttattgcttgatacaacagcaggacccttgcctgtgcctgtagttattatgttcgggaagtagtgatttgtgagaacattagtggttgtgggggaaataaaaatgtaaagaactgtagtttttcatgctcttggactgttatgtaactccaattgcaattatacaagtggggagttcatcctccaaattatttgatttgtgcagacaaatgaaacaggtttaattcaaatacgatggctctctacctaagcattgctaaatgaactgaaaatcaatgtgccaattacttctgcttgtcagggcccaagaagactttctttttattaggccaggggacttctataacctgcatgctttaaattataccatcccaataactaacttccaaatacactgactaaaaaatgaatagaacccaaaactaaaattattttgatctttatggtgctccaaaaacttaagatgcaactgttcttctaaataaatccataacttacagattattccttctttactttcacaatttttacgttgctgccagaagtcttctcagcatttgctttgaattctgtcttcagtgcatctctcactgcttttgcacagatctgggagtatcggatgtagctgggagaaaatgagagaaggtatatggttaattatcaatattccagccagacagctgttactgtgttttcgcttttcttcctgtactttttattttggtttggttgtaccttattgtagaattggatttaaaaatatgactaatgccaaaaagtatctatacaaagaaaaagaactagaaaaaaatgtaccaaagtattaactggtgtttggatggatgatctttgatttttcttctttgtactgtgttttctctttagtgtatattaattcaaaatgaaagatgcataaatgtttttaaaaatcccacagcatagaaaaaaagagactgaaatgtttagagactataacatgaatcatgaattctctcctcgatttctctccttaaaactttaattatattattcttggaaaatgaggtatacataagagaaaactattttgaattaaaacaattcgttctaaattatttaaactcttctctgagaatactgaattctgtctcacaagtctgccactgaaaataacctcctaatgaagatttctaaatcaaactgaaaagtgcttagagaacatcatcaattctagcaaaactgtaaaacctgcttcctgtttggtagatggactcccatcaacactgtagtttccaaaagatgtcagatcacctttcccacttttgaaaaacaggaagcggggaggggtgctattttctcatgttttagaatttattttggggactcagaggtatgagttccaatgcctgcttccattcttactaactgggtgaccttcaggctgttcaaccttttcagcacgtttactcactcacctgaaaaaaacaacagaataaaaggacaataatacctgtcctgctgatagctgggaggaggaaaaacaagtgtgaaaaagtatggatcacagggtaggttgcctaataaacggtatctactactgggactatcatccttccatccttccaattctacaagacttcgctggcttgacctcagcaagtcgggaagctccgctgtagtgtacccacaaaatgtaaagtgctacaccatccagtcaactaacaaggtgtgtcacctagagcaaggtacttctgctcactcaggtgcacgggtaaaaaaaaatcggatgtgacagctagaccaatggtttgcggttccactatgagacaccatgtcctcaagtgggttccatatttgagctttccaggagccacctctcatctttgtgaggggctctcgacagttatggctttcaccccttttagacataaggaaacctgaaatcaacaggacttaaaagtttaaaaaaaaaatgtgtaaagttgtaaaaggctccacctcgatgctggattaaaggtcaaagctgctaacggcggtcacgtggagagaaatctcctgtttcccgaggtggatgtgactgtactactttcaccacctggctccagcaccattctagaagaaaaaggtttgctaaataagagctggcctctctctcgagaaacctgccattcacaaaggtgtccaggggcactctgtgggtgctgggccgcaccgtcgggaagcgaggcaggacacagacgcgctcccacgcgaggtcgaggccgcgcccgcctgagcgctttgcccacagcgacgccatcttggcggcgacgcccgaggcttggcccaaccccggtcacgcgtggggccgctgctctgtgtcctgcatgacctctgggcaccgggatgcgcgcgggccggctcgcgaagcccttccctctggaggcctgggcctacctgagtccagcctgtctccagtaggccaccatgctgtagcgaaagcggagctcgtcgggccgaatcgccaagacgccggcaatgtcggctcagccgggcggttcagccgcaggaagatcagaccacagaagcggaagaggcggggcgtgcggacctgccaatcaccgcctcctacccggccccgcccctgagcacggcccctgctgccctgccgcggaagccccccggcgccgggagccaatgggcgcgcgcggtctggactgcgggtgccaatcccggggcgggccggccggccgcgcccacctattggctccaagagctcccggggcgtgtgtcccccgaccttccgtattaccccggcggggacgacgggggcaagaaggccggggtgtccccgctcgctaaggaccactgagccgcgtgctttcgggaagcgaggacgcgaggcggcgcgggcacggccgccccgagggcctggctttgcgcccgcttcagggaaacggcgccggcttttttaaatctgtggacagacaagcgtgtcctgagagctgagatttagaaaggctcttagggcaccccctttctcggagtgacactaaaccctggaaacccagtggaggaccccctagcgttttctgtagttctaggacctgcttccgatgtgcgacaagacggagggtaaggcaacagttgtcactgttgcccggaatggatgggaagaaaaatgtgaggaaaacccactggaggcacagggaactgccaggcggccgggaaaatgctcatctcagagcctgtgatttagagaaactaacccaacgcagtgaaggctcacagtctaggaattaaagtgtttctctcataaagaaaaaaaagcctttgcccttcacctttaattactaaaaagaaattataatcaggaaaaacatcacttaaaagaaagtttttattaacaaaagttttccttaattcacatttcaactttattaaatagtccaagggtttcatttatgaacacttattccagtttagttctcttaaattcatttgcttgttgtgcatttatgtttaaaaaggtaactaactgcactggaaaatgaaaatttatagttttatcaataggtcagtttttaaaaaatcaaaggataaggatttaaaaatattagggcattacacctttttcagaacaaggataatttacagaaattatacaaagcagattttcatcaaatatcaattatttagcgatgttttatttagctgaaatgttatttcacttgtaaaaactatctccggttacaaaaaaaaatcagaaaccttattaaatttaacctgcttttacaaatgtcctaagaagtcttaagctaaacaaaatttaagtaggaaaacgataatttaaaaatagtgtgttatactatttctgtggtttatgtacatatattaactggtctcttggataggaaacatgactagaagtttatcacactaagcactgtaaaataaaggcaagagctaatcatcttctagcaaaaatagtctctatgcaacaattgcaaatgtcaaagctattatttagtagttaattgcctgctacaatacataaaacaaagtacatttactggattgtttttcagtttgcagctgccctcttgacatcccaaataaggaattcccgttaagtaaaacctgcagtgcaattcactcagtggttagtttcaggccaagcctccccctaccattatgcttgttcttccccaccgcccccaaatcctgcagtggcaccatattattaaaaacactaagtacctgggatttatgcctcagagcaagacatcatttgagtaatttcaaatgatacacagctccttcatgtaaaaaagatgttttgtggtcacaattacttcaaaaagtaattatattcaaataacctgacatatcatgccttagcaattacaaaaccatgattttgacacatggcaatttttaagttaggcaaatgtaaaatgctaaaagatgtgaacagctgttcttctgtttaagttagagcactgcaaaactcaggtaatgactttatttttttcagttaacataaccagcccacgatacagcatactaaatcacaaagtacaaatccaaggaagttaatacctttactaagttacaaaacttgggcaaatcaatacagtactcttttataatgaaaccatacttttgttggagtcatgttactttagtgataattttcactccaaaaatatttaagtaccaaatcaaaacactggtttttaatggtggtttatagcatagtaaggtattttacacaaaatatattttaaaactacacaatttctccttttaagtgagctcccttgtgcaagctgctgaagtgtacagcagcagggcaatgggcgtctataggaggtggctctgctctgttctggggttggtccaaagtcaggtggagttccaatgtatgaaaagcttgaaaaatctaccttaaggagactgaatatcaataccagtttccaaggagttcttgttgaattttcacagaaatactggaaccctcaaaatcagatagtaatttcaaacaacattaatttcagatgatcccttttatttagaggccctgcatctgttttgatcaagtcacatagccttacaccaacttatcaaaaaaaaaaaaaaaaaaactacccaaaatatagttgtatttttaaaataacaaataaatatatagtcagtttggagagacctggagtacccgatgttgtctaccaactgtcacgatcacttctctgcaaacgctgctgctgccattggagtccttatggttcctcttgctgaggctgtcagttcttcaatctcagcatttaatttatgtattacccattccattgcttctcggcccttaaaaaaaatccaatacatttattgttactgagggagagcaaaggcatatatcgaactaatgacacaccaggaagtaacaaggggcgtgacaagtttaactcaatctcaggatgacagatcgtttttgtcctggctttttctaatgttatttagcaaacatcaaatgccttgagcaactggcttgatccataaactgacttttactttgtatgcaaaagatgttctcaaatgaatctacaattaaatgacagaatgtcttatttgtttcatgattatagtggtcccctttttaggggcaagaaggtcaaatcccttttctttacattttaaaccaaaatcctgtgcaaggtcctgcaggatctggtcctcaactcactcctcaccccttctctcctagtgttctatatagttccttgaaaaacagagcattccctacttcctgtctcagggcctttgcacacgcagctcctccacctagaacactcttcttggaatacccctcgcaatccacctgcccccatttggcagtcagcagaaacatcagttactgaacactcaataagcactctcatacctttctgtaccttttctttcctaattacatgctgtatgattaatgtcacctgcctcttagttccacgggggcagggaccacatttgttttgctccctgctgtataccctgtctagcctagcactctgcatggcacagagaaggcatccatgagtatctcttgataaccacattcaccatgtgttatgtaacagtgcatggcatctttctctaaacttactgtttcagatcatgcattctcaataagcaaaaattggttcttggggggatggaaaaaatctccctcttttatgtataaagcccacacatatgtatatgatatatgacttaatggaggtggcaattagggaaaaaatgtctaaaacgagttgtgggggagacaacagtgaaaaaaggttgagaaacagtgccttaaatgacacgcagctacacatcatcgagcacttcctcagtgctgggcctcaggctacacactttccatatgttatctcattcactccacgccaaccctgtaaaacgggtaatctccactttaaaaacgggaaactgaggcatagaaaggttaacttagttgcccaaggttaaaaggctaaaagttagagcttggatgtgaacccagagcctttgtaagtaactgcccaacgtgctgcagtttcctatggtagaatgggcaagggtcagcttacaaggacacacatgcagtcagcaccccattccattcccaggaaatgaaccagggaataataaccaagaagcagcctcacttactttactagcatttgaggatatcgtacttgccatcagtccttcaaggtaactgctgaggctaactcctttcacggtaattatggcttcttgtgtcaaaacagttctggaacaaaacatattcacacaggttcagatgacccagctttcattttcaaaaaacttgataaaaaaaccttaaacaccctttacgatacatttgttaaaatattttttactcacttttctggatcctgaggatgtggtttgtatataagtctctcatctactgaaaccatgtttgtaaatgaaatctacagaatgaagaaaaaaaaaaaagatcaaatcattttggaactgaagattcaaaatgttgctaaaatcaacacacaagccaaaatcttactaaacatacaaaacaacaaataaaccgctgctattattgcataaactattcactgcctactttttatttaaaaagcaaagttgaggaaataaagtataataatgataatacacataatcccaaactcattttattgagtgctatccccttagagataggcaagatcatgagagcaggaagggtaaggaagcaacatccagggccaagttaggccagcacataagcagggattctctgaaccacatcatgaacacgcactcacttctacggcaactaggagagggacaaagaactcagccagacagttcgaaatgaaacaaaagggagccaagacttacattagtagatttaagttccattgttttctctacaggatcaactacagaatgttcttgcacatatgttttcgttcttgctgcaccaataagctaagtaaaacattcagaactaggaatcagaggaggaagaatttcttaccaagtctatcaatattttatttgaaggaaaaaatgtgttacaatattttgaaccaaaaatctgttttctaaaaaccagaggaaacaagcaaaggtcagaaaggaggcctattcacatatcatggatgagaggagactgccagacacaaaaacttttcccggaggcaattagaaaccagcccactgagaacgtctgcaacgtgaggcagcacgctgaatctgccgcggtgcgacggtggagcgctgaggctgagatatggaaatcaggtttggggcaacatggcagctagaaaaaggagaactcaaaggcatctgtcagtatcttcctagaacagcccaagggagggggcacctcagcttcattctccagacagaaaaacagcgttcttacgatggaggctcacacgtcagtgtccactgtcactccctgtgctatgaccccaagcccaccccctgaccctgctcatttctgtgtctgcactatggtttgcataaggaggcagtaagtacattcctattgaaaatgtgtactttagttttcttagtgaacctactctccataaagagaccctctaaagaaacctggatccacttattataccagttttctcgcattatggtaaactggcattttagtttcttcctggtaaaatctgctcactaaagcctgctcattcttaagggaatagaattgtttctaaatgtacaggaaggagttccagaccttggaacaaatgtggcaataacaagtccgagaacatagtccttacttaatgtacacaacccaccactgaccacagaactgtcacctaacaattatgaccagaccattactgccaaaccttagtattggtctcaagttgctggcaaaagcagaaaaagcagaatagaactcctttcagatcacacggcattagctggcttccttaagaaaattttattgggtgccttcatgaagactgtaataatatttccaattcattatacactcataattcaagtttattataatacaacttgaacggatgcaaaaaatgacattcagaatcggctcccacaacctatttgaaagtataatgcggtttagaaaacttctctacagcagtcacatttctccgggaataaagacacacttacagacttcacaatggaaggcagtccccactctgtgctgagaagtctgtggctgtgcaactttccagagggatctatatgtctgtccaacacatcaactccaaccacacttgggttcatagggtttgggtatttctgcattgcagctgttgtaacagtttcccacgggtggctgccgatgtgaaccaaaaaaaaaaaaaaaaaaattcagacatttaaaattatgcatatgagttaaacaatttttataatctatcaaatcattcattacaatgtaagtttaatgagtttacctaggaaaaattaccttctgaaacactgatgattatgggaaactgatctacatttttaacaggcttcagtatttttccacaatacaggctatgtaaaaaaactcatatctataaagatcaaagcagtctacaccatctttcctacttatccttatccactttcacatgtaaattgtttctaggaagaaccaatgattcatgaaaatgtatttaaaaattatgttctactgaaacaaatagccaaaagtatcattatgccatttattattttttctgaccccaattctatcagtttatacggaagtaacaaaagtaaaagagtttatgggcactataaattcttacagggatcacaaaaagatccaaagcattgatttaattattgaactttcccttcattttaatgtaatacataacaatggctcctccagtcaatctttatctactgtttttctcaaaagagtgattctgatttctgttttgaaaaggtcactcaatataataaaatgtccttaaggtgcactcctaatatactattttctaatattctcttttaatataataagcacttgcttatcacctagtattgaagtggtaataatatcacatcacttgagaacttgcagtatctttattttcttcaaaaaggcacatgtgcttggatgattcaaaatgtgatgcaacctttgttcacttcacaacttctgtgaataagacacttgtacaaaaaatatcattttcaaaaggaccccttattaagtacaatcagtattaaaggtgacttagtccacctgcagtctgattcggatgctttctacactacttatctgtgctctcatcttcatttaaaggaaaaagacaagatctggggatgatgttcaagccacaatgactgttaagccacacagcattactttttatttttctaaaagtaaaacaagtagacattattccaaccttttagagaactcagattgacaactacatctcgttgacaaaaggaaaatctcaactccattaatttcccagaaccctggacaaccagtgacatcatttttaatgttttcattataatattcttttctatacaatattgtaccaatgaacctcattctgtctttagtctccagccttatccagcaatcaatgcaggtatataagcagagttgcttcatcaatctgaagtgtcccgacaaatcgaagcatacaggccaagcactgattcttaccaaggcaactctctaaaatgaaaatcagatgaaccctccccaggtctccatccagtcatatgccatggttagctggcttccatgcccttacctcttcccccaaccctctctaaaaaattaataatcgcatgacttcagggtggttatgcattatttgtaatttagtccatctctcctttctgaaccaacttgaaaccactgatgttgacttagcttggctcaagattgctttatgaaccataaccagctcaaacattacaaacaatacttattatgattaatcttccagcaattaatctgagctgtattaacataattacgtggaaaagatctcacaatggaagacattcaaagaccacgccaaagtagaatcaggaggacctggctatggctcactgaccggtccaacttcttcacctttgaaacgaggtgaggacattattaactccactggcgcagcatcgaggtcttgatttacttatgaaaatgtaatcaatccaaagaacagtggctgacacatactgggcatctctataagttgaaggaatcaatgaatgacttcacctggatgccaactataggcctcagaagaaaagtgttggaaaatcaaagacagataagatgtagaatgatgacttagacattgttagagagtgacatcctaaagatcagaaacaacgctcagatttgtcaggggagatgatgacttcaatttcagacaggctgagttttaagggcctgtgggacacgagggtagcaatgcctaacaggcacctgaaaatgaaaagcggagctcaagagaggctggagctcaaggtacagatctgggtgccataaatgtatacctatcatttgggactttgaccaaacagctcagattatgtggggagaaagcacggatcagggctgcttctcccaggacaaaaaaaaagtctgtgacgaaaagagaaacaaaaaagaaattaagatcacaggtaaaatccaatataggaaggccaacacagaatctcactgaacatttacactgaatgggaaaagacagggaagcgctgaagacaaaggcagaaagagtgtagagggaaggaggggatgagccaggaagaagagttagggaagatatgggagaagacagttctagggagactgagtgccgagaacctctgaagcatgcaaacccagaagaggactgaagcatgcaaacctggaagaggactgaaattaaacatcctcggagctgaaatggactagtgatgaatgcgaccaggttaatgaacatctaaatgaccacaaatttcgggtctttttcctcccaaaaagactaaacagtagggggaaaagaaagcttccttctgattccagtattctatactttgcaggatacagcaggccctaggatgtgtcccactgagtacaaatgcggacaacgttttaaaagttgccttcagaggccgggcacagtggcccacacctgtaatcccggcactttgggaggccaaggcgggcgaatcacctgaggtcaggtgcgacctgaccagggcgaatcactttgagaccaacctgaccaacatggtgaaactccgtctctactaaaaatacaaaaattagccgggcgcggtggtgggcgcctgtaatcccagctacttgggaggccaaggcaggagaatcgtttgaacacgggagacggaggttgcagtgagccaagaacacgccactactctccagcctgggcaacagagcgagactctgcctcaaaaaagaaatttaaaaaaaatttgccttcagagacagttttaaaaacataaatggctttgtagcatatttatttacaaggctatactaattaaaacagtgtggcaacgacattaagatcagcggaacagagcaggtaactcgggaaaaaaaaggatttcgctgcttaaatttgtggctcttttgtaaatggaatcagggacctagaagagaatataattctccacatccaactggttcaaggcttagtttcgttagtaaacagttcacattatccaaaaagatgttcctgaacgtggcctcaaagagctaacacgggtaggccctgacgatcgtccttttccatctctcagatgaaaatgggtaacccagggtcacacgcttgttacagccagagctagaccttgaattccaaatccaaggctctgctgcgtagatgaacgagttgtgaaaaggcttcacatcctggtggtcagagttcacccgaaattcacattcgaaggtagaaactccacccaaacggcggccagggaaagtacactctggagaaaaccaacacctccctcttgggatcctcgggtccacgtcccaaagtggtttcacagggcgggatggggcaaccctgagtgctgtcaagggcttcgtgctccgcgacgcccccaggacctcaggaggccgccggcccgaggctacctcatggtgggggacagcccggaagtgaccccgtagccctgccggtcgcaaggccgcctgggtctggaggtcggagccgtcccctcggctagggcgcctcggggtcgtgaccttggtctgccctccgtgtcgccggggcccgcaggcttcagagttcgctcccctcgctaggcccgacgcctagaagcctcctgcgggccgcctctgcctcgcctctactccagggccggcgtgcctgccctccacggagccgacccgcgccccaaacttactcaaagacgtgctccgaagtccagatcttcatggtgccggcaccctgagagatgtccgggtagcgccaggggacaacgaggcacagaggctacacctgcccctgccccgcccccagcaccccagccggcggcgcagtgcgcaggcgctgtcgggcccgacgcgagggacgtccagacgcgcggccccacgccctatcccggcccgggttttgccccagccttgcgcgcggcgcaaggaaaccccgcctcttagcgccgggcgcatcgcgccggcgcagtgccgccgacggcagctggaggggccggcgcgggcgctgtgctgcgcaggcgcggcgggcttgtagcgagccttgacctctgggcagagttgggtcaggtccaggaggtgcctgcgcgcccgcttggccctccttgtccttctggcccagcacatcctcgcctggcatttcgaggcgtgtggacgcatgcggtcagcctgctgacatagatgttcgttgtggtggtcacttgtgcaaaatttcctggtgccctatagagagttccagccacctcctgggtcagcccgggctgttttcccaaatccaccagccacccagccgatcagctgggccagtcccacctgcccgccaggagcttgcagccctcggaggggataaataaggcgtgacgcggagaagctaacatcagacctgcccatgaataatacccctacgagggatgcggtccggaagcacggtgccaggggtcgggtagaaaagcttcctggccgggcacaccttgccctaggtgcataggatggatctgagctgagatgtctctcccagagagacttccctcgtcaccgtttctcaccttgttgctctgctccgtcacaatatcctgttgcattttttatagcacttacccctctgacatcatcttgttaatttatttgtgaaaattcacaatcgaactgagttcttgaaggcaagaatcttgccggtcttgctcaaaaatcatcctcagtgtctcccatatagtcaaggctcaatgactacttattgaaaaatgaaaaaaatcaatagctatttgtgggatgaatgaattaatggagtcatctagtttatttgttgtaacttccgctagactgtaagcccctgagggcgaggctcttgccagacttgttcagtgatttcccccttcctaaatgacaattatttgttgcatcaatggatgaaagaatgactaagaattgctggggcaggaggaggtggcatgtggtttcattcagagatgagccttgtccagggaacagactgcctggcttagctttcagaatatggcttcccaccctgctctcctgcactctccacagccgtctacctcctaacagaacaatttgccattttcaatgaaggttatggaggaaaatctttacatctagttacttagaagcttgttagaaggaccacctcattcttgttcttagcttgtttgattgttaaagacaaaaagccaggttaatttaggagggaggataatttttcaaaataacataagtcctttatacaggaaaacaaaaattacattagacaggaaggaaataatatggttgggtagttgctaagtgcaatttgtggtacctgagattttctttttttaaacctacagtacttaagagtgatttcttggggaggtaatgctttaagggctactgagagtacctcagccttgactaagatgcagttaacgtcgctgggtgttaaaaacactggttcaagaaccatcagcacagaacagcctgtccctgctattcctggagttccatgaggctgttcaccattcagcattcctgttctgtttattttagagaacattattctgctctcaagttcaaaatttctgtgttttagtcatgaaaattaaatgacacctatctcccgtgcccccaacacacatactatatcagtctaattttacttactagatctagagtggtgggatggggcatggaaagatggagatccaggacccaattgtcttctctgcgtgtctcctcatggtagaaataataccacctcttgcttggatttggagggtaagacttacataatgattatctcctggagactctgttaggagacacagaggaagcaaattaatggtttttagatacctaagcactgcattacttgacagtgcctctcacagaaacagagaagtcattaacaacagatcattactttgatttgaaattaactaggtgactggtagttatggcccttgccccagggatgacacacatctccacacccttcctgctgggatctcctgttgggatcttgccgagctccgtgtctgggatgagaatgcagacattaactcttacctacaaggaactttacaactggccaggaaccaaaaccaaaacacaagtcaagaatcaactagaggatatttatttattttttagacagagtcccactccgtcacccaggcccagcctggagtgcaatggcacgatcttggctcactgcaacctctgcctcccaggttcaagtgattttcctgcctcagcctctggagtagctgggattacaggtgcgtgccaccacacccaggtaatttttgtatttttagtagagatggggtttcaccatgttgaccaggctggtcttgaactcctaacctcaagtgatctgcctgcctcggcctcccaaagtgctgggattataggcataagccaccatgcccagcaagaatcaactagaggatatttaaaggaagggttgggtgttcacagccaagagacccagaactttgaagtgcagcctctgggtccttatggaaggtagtgggcagaggaggattggctaagaggctgggatcaggggttggtatagcaagaggcagatggcagcactgacatgagtggccccatgttagccagttccagagacaggccaggcaggagaagcactccatcgtcagctgggcctcagctactgttatttccaaattcccctcacttgcacaccacctttacagctgttgccctatcttcattccacatgtcccattgttcccggaccaaatcaatggtcaggctgcttattctcaaggcccaataacgagatgcagatgaactgggagagaagagagttaaccggttacagggaggaggcctggaaattatcaccagaccaacttaaaattacaaagttttccagagcttatataccttttaagctatatgtctatgtgtaagtgtgcattcatctaaagacataagtgattaacctcttctaatctataactaagatctgagtcctgaagaccttcctctggagcttcagtaaatttatttaatctaaatgggtccaggtgctgggatgattactcctgctacatcatggaggtttggggaattccttcagacccctaataaatgtgtctatggaggcctggggagtttcttcagacccctagtaaaacttgtttaatcctaagcaggttctgttaagaattcctttgccatcttgtcatacttcaaggcccaggaaaggcctagacaaaactcttggtgggctttcgtgacattccagcctttgtgtaaggacactgactcttttggcttttcatatttaaccactcagtcagcatggaaacagttgttatggaggcctgcatcagtgagacctggcctgccacaccattgctacttgactttttatatcactgtggtctaagaagaaacgtacttggtctttgtcccgcattcttgtcacagagctcctaaaacccttgggatttcctgaatgatagggatgcctttgattatttataacaagctccttttgataccatctccaggtagatggtgttggaattgtaatggctgctagagaattgtgtggttggtggagagaactcccacacatctatgtcggaacgtatgtgtgttgagagtctagtagtaggaaaaaccatgtgtttttgtcagaatcagcttccttacaaatacacttgaaaggaaactttatataactactttcattagaaaaccagtatttttaccctgataaatgctaaatacatgactcttaaaataaggcagtgagccccgtgggccttcctaacaccttctcgtctcctcacaaagtgggcatgtctcactttggtgctgacttccaaacttcccaggtgctttttggactctcatccattctcctcaaactccaagccaccttttcctctgaatctctcagcagtgacctttatctctaaattcactgtgaactccttcaactgtcttcttctctttgtattctcatgaatcctttccgtatatcttcttaactctgagaatctttctctctttccctccctccttccctccctccctccttccttccttctttccttccttcctctctctttctctctctctttctttcttcctttctttcaacagagtcttgctctgtctcccaggctggcgtgcagtggcgtgatcttggctcactgcaacctcctcctcctaggttcaaacaattcccctgcctcagcctcttgagtagctgggattacaggcatgcaccaccgctggctaatttttgtatttctagtagagatgggatttcgccatcttggccaggctggtctcaaactcctgacctcaagtgatccacctgccttggcttcccaaagtgctgggattacaggcgtgagccaccatgcccggcctcgtttttacatttttattttagagacagagctttgctctgttgcctaggctggagtgcagcagcatgattatggcttactgcagctttgacctcctgggctaaatcgatcctcctgcctcagcctcccgagtagctggaactacagatgcgtgccaccatgcccggccatgataatgtgtcccttctcctttccagtctttttgtctgtgctcccttcatttagtcattgcacaaataacaactgatcatctattctgggtcatccctatcacactacagcagcaggtgacaatttccctagggacgatattccccaggggacattggcactgtctggagacatgctcggttgtcccaactggtggtgagggtgccactggcatctgtgggtagaggccagcgatgctgctaaacatcctacaatgcacaagttggcaactgactccctgccccaacaaagagggatctggccccaaatgttgacaacgtcagtgttgaaaccctggggttcatctaacaggctcttatctctgtccccgtctacctgtctggctttgatgttttctcctcccattctccaactcagctgaacccacagccacataaatctctcgctatccttacaggccatgcatttccacacccttgaactttgcacatggtgttctctccacccagaatgcactttcctctgatttgccctggaaagtcttactcatatcttgagattctgtgcaaatactctactctccaagtgtctcactgatacgcctctccccactagctgagcacagtgccttgtttcggcttctgtgctcctgtttgcatttgacacagccctcattatgacacatcactgtggaagtgttgtgtgtgtgtccacactgcaatttaaagtccaaagtgatgacttctgtgttagaaggatgggggtgggagcatggctccttatcaacctcttcatcatttgagtccttactataaatgtggccacacagtgaagcaagaatcatcataacaagaaaatatttgccactgaaccaaatctgtacatataaacttggtgccttatgaaagcagcagcatagatcctcatcgcttgaacctatgtgattgctggttagtctcccactgattgtccaaggctaaaaataacacaagtggttggaaagtgaaaccaaaactcttggagaagatgcagaatttcatcaagttgatgagaatgatattcaagaactccttcattatacactaacccatcaatagatgactttgtgtagaattaaagcagttaacatttgagcagacaaaattggcaagggatggttcacaaagaaaatgatatgaatggctaaaagttgggaaagacccttgggaaaaatattcgagtccttgaatatttctgcaaagatgtccatctctgcgactgagttgtgaaattcaaacatattttgcagtgctattttccagtttggtgaggaaaatcattgcagaaaccagcacttggttcattctatgtgataacaatttgatagagttacaattttaatctaacacatgtatgtatatatatatatctcatataaatatctatcattatatatatcactaaatatacacatatggatatatgtgtatatatataaacttactatcattactttattttatgttatttatttatttttgagatggagtctcactctgtcgcccaggctggagggcagtggcacaatctaggttcactgcaacctctgcctcctgggttcaagcaaatctcctgtctcagcctctcaagtagctgggattacaggcacccgccaccacacctggctactttttgtatttttagtagagatgggttttcaccatgttggtcaggctggtcttgaactcctgacctcaagtgatccgccacctcggcctcccaaagtgctgggattacaggtgtgagccaccacgcccagtcagtatcatcattttatgtttcatttttcagggtaaagtgtcagctgcactttttgtttttcatcatttactgtaaaatattgatgttgcttttaagtggatttgctttcagtgagcttattgggtaccaattgcataccagaaatgacagctttcttcaaactccaacagctaggactacacagggaggtcggtgaggagagagatgcaatcagtacttcggttacaaacaataagggcagcggtgataggagaggagcaggaaattggagccatgtttaggaagctgtactggcacagcccgggacactcttaccttttcacttgtggcccaggtggccctgatggaatagagagccagagtctgcgtggccatagaataagccagagagaagtgaccagcacagctcaagcctgagatttcaacatccctatcagctctccaacctagggagtgtaactggctgagaaggagagaccagaacacaggaggggctcaggggctcccaagccctcagacatggcatccaccccttgtctctgcaaaggcaaactccccattttaggaatcacattactcctaatttaatacaaatctttctttctttctctccttctctttctttctctctttctttctttctttctttctttctttctttctttctttctttctttctctctctctctctctctctctttcttctttctttctttctttttgtttttttctttgagacaaggtctcttatgttgcccaggctggtcaaaccctggcctcaagtgatcctcctgcctcagcttcccaaagtgctgggattacaggcatgagccaccccacgcagcctagaatctagagtcaaattcaattttgtttccattagtgattgaagatttcaggtagccatacagaacttcctgtctatgatttttcccattttttgtttacctaaatatagaaataacttattcttgaatccctgtcttaagaaatgaatctcttctggaaagctctgactatcacaggaattccccatcctgagaaattaaaggtaatttcttaatgctaaatcaatctgtctaattagcagtttttccataaccaggtccatgtcaaaactagcttttctctttttctatgctaaaaggttttatcctgaaaagactctcatatactcacatacacgatggtataaaacctggcccagaaattctcactgggataatgaaaatgacatcattgcatgtgtgtcctgagatgaacagttcttgcagtcctttcttttacattcatttgagtgatattgcttgtttcctattacaacatcaggagatggaagtcactgaccagctgccaacacctgagcaccacaggctcatagtttctcttttttcttttctcttatgtgggaccttttttttttttttttttttttttttagctggattctcactctgtcacctaggccagagtgcaatgatgcgatctcagctcactgcaacctcctcctcctgagttcaagcgattctcctgcctcagcctcccaagtagctgggattacaagcacccaccaccacgctaggctaatttttgtagctttttagtagagacagggtttcatcatgttggccaggctggtctcgaattcctgacctcaggtgatccacctgcctcagcctcccaaagtgctaggattacagacatgacccacagcacctggcccatgtcggataacttttaggaagagaagatagagatttcagcttctgttctcattgtattctcattccattctcattcttgtattctcctcccaaacaaaataaaacaaagaaatgtgtcctttctagctttatgcatgcatgtcctccgaggaaaggcagtcctcttcatgtttagatgctccaaaatgatgtcaaaaattttccgaaaggttttttcccaccaagtgtaaagtaaactgaagcattctagactatgaggcaaacccagcaggatcgaagggactgcaagcatctagggttgtgatgttttcagttctggtaagaaagagcacatggacagaaagaggcagagagatggtctgtctcattcacaggtatatccgcaataccaggcacatagtaacggctcagtaagcatctgttgggtgaataaaggcatcaacagaaagcaagccaagtcctggtgttaggtaacccatgccttatttatcatcaaggggtcaacaatatatagtgtgtacagtttatgagccctgacatttaccagaatttggaacttgcaaggcataacatgaaggtcccaatccagtaagaacacaagggtacggggagagaatcagcaggtgcccaaatctgggcagtgccgctgccagctctctgggtcccaaagccacgtctagggagaccagggcacctagaagcagcagttgttccccagctggctgtgcagagcaggtctggagggagacaggtgcccgcagcccaaactgccttcatttgagagaacagctgtttgcttgggccttaggctgaggaaaaaaatgctgagccatatgtccttagtaaatcagtgcatggccctatcagaaaaagtgcccaaatgattgattagaaagtaaccagccagcccttacgtatagctttacttgtgtgctgcaagtttgtttaatgtcaaaatgtaccaaaatccaccctgcgccttccacttccatttttcatcacagaaatatttgccaaatgcatgcactgaaaccactggggaagagaagaaagtaagacattttcttaagaggagggactgcaaagtgaggcagaaactcgaacaggaaacaccctcttttatggattgtgtgtgatgttaaacaatgatgagaatgtttctgagtacttgcaggctgatagatcataaaggaatcttaaattcacctagacctttttttcaaacactcagacacctaccagatggggaaacagaggcactagaacccatatgttgacaatctttggaatccattgagttaagaccataatctacatctctagtctttttcctttgctgacttgtctattcactcagagtaacaacgtagaaaaagcctaccttaagaaggagtttcaacggtttctcatttcttcaaatggtattgaatataattccatataagctttagtcctcaaacagctttagtcacttacatcagccaactggtaccttcagcaaaaatacattcaggtatttacatttttaacaagataaatcagcacatagcattggttgtatatttatcaaaattctaccttgggtaattgtgatttattggaaaaattaatatcaaaatctaaaatgttaatcaaacttaactgaaaaatgcaaaaatcagcacctttctttcaaaccagcagtgatcatgtataaacaataatagaaaaaccctatcaaaaataactcaaggccaagtgcagtggctcacgcctgtaatcccagcactttgggaggctaaggtgggtggatcacttgaggtcaggcattcgagacctgcctggctaacatgctgaaaccccatctctactaaaaatacaaaaattagccgggcatggtggtgcgtgcctgtaatcccagctacttgggaggctgaggcaggagaatcgcctgaacccaggaggcggaggttgcagtgagccgagattgtatcattgcagtccagcctaggcaacagagcgagactttctcaaaaaagaaaagaaaaggacctaaaaatatgaaatatctagcaagaaatcttaacaagagatgtataggatctaaatgaagagaatcataaattttctctgaagaacgtaacaggaaacctgaataaaagatgatataccatgcttctgggcagggagattcagtgttttgatactgtcaattctccctaaattagttgaatgaaattccagttgaaatctcagtaggacagttttggaacctgacagagtgatcctaatgtttctttggaagaacaaacaggtgagggtggccaggaaagttttgaaaaggtaaagggaggaattcaatctaccagatattacaacatattaggtagctatagtagctaaagtagtgcgaaactgagcaaaaatgggtagaaagaaatggatacccttaaaatcaaccttaacatatatgacattttagcatgtattttaaatgggcatttcaaatccaaggggaaaggatagattagtaaataaatggtgctgaaacagccagttaagtatttggaaaagacagaaagtaggattatctcaggctatatatctaaatcaatcagagattacctaaagagagaaatactaaaaatctagttattcatacagcttcaattgcctaagtgggacagagtcacaaatatagaaaacatcaaaaacattaaaaggaaaatatagtatgaaaatatttaccacaaatgtaatggattaagagttaattttcttaaaatataggctgggtgccgtggctcacgcctgtaatcccagcactttgggaggccaaggtgggtagatcacttgaagtcaggagttcgagatgagcctgactaacatggtgaaaccccgtctctactaaaataaaaaaatcagccagcgtagtagcatgagcctgtaatcccacctacttgggagactgaggcaagggaattgctcaaacctgggaggcagaggttgcagtgaaccgagatcatgccattgcactccagcctgggcaatagaatgagactccgtctaaattaaaaaaaatatatatatatatatatatcctcatataaccattagaaacccactaaaaccctttagaaaatgaaaataccatgaacagacaattggtagaaaaaatgcaagtgattaatgtgaaaaaatgttccactgctttggtgatcaaataaatgcccattaaaaccatataccatttttggcctatcaacttagcaaatcgaaatatagctcttattcaaagttggtgaatatgaagtgaggtaggtactttcatacacttctattgaaagtatcagttggtacagtctttctggagaacaatttagcaatatctatgaagagtcttaaacattcctgtttgtccttgtgattctcaatgcaggaatttaaggaaattcagaaatttggaccaagatctaagtcacagaattgtttgtaataatataaagctggaaaaaccttaagtgttcagaaaaagattcactagttggatcatgaagaaacagaatttgtgttttaaggggagggagaagaagtgggagaattctagggagaaagaacagcgagggtgataggaagggtacatgaaagtacattgcaagtttgatttggaaactgtagtgtgctctggaaggccaggtgaggggcagatagaaggggtaagaagaggtgagggtcagaggcttgtgtagcggtctatctcctgcatgagaatttaagatgtaaggactctgggttggttatctttatatccttccaagttcctaataggtgcttaacaaatgtctgctcaataatcaagagatttctttcagtgttgagcggctttgagttctgtgttgttaggttatggttttcctctatagctagtaaagattcagcaagttttttctttttctttttttttttttttttgagacagagtctcgctctgtcgcccaggctggagtgcagtggcgccatctcggctcactgcaatctctgcctcccgggttcacgccattctcctgcctcagcctcccgagtagctgggactacaggcgcccgccaccacgcccggctaattttttgtatttttagtagagacggggtttcaccgtgttagccaggatggtctcagtctcctgacctcgtgatccgcccgcctcggcctcccgaagtgctgggattacaggcttgagccaccgcgcccagctagatccagaaaagttacttaggaagaaaattaataacgactctccttaagtaacttggttgatttatgacaggcattaaatgatactttaaaacagccttatgtggacttcagtcagtagggggtgcaccaatgctgaaaattctgatactaataaagaatagcacttatttgttaatcttacggtccttcgtcctgcttactatttgtcccttttttgcccatctcaccactctctatcccccacattaagaaatttctcattgctgcacataccaccagttataaaactggattttaataagagttaatttaatgttgctgtttattaaattgttacaagtaagtgtgacatttttgagaaattgctgtatggagaagagtttaaattgtgcttatttattcatgacacattttttatcacaatagttgagaaagtattagtactagtaaaaaatggaggtgatatttaatagtccatggggacacaaattgtataattaaaagaagagtaatagtgacctttagataaagcatatttcataaagtgctcattaaaaaggagttcacttttggaactttattttctcaaagttctctttataaaatagaattaataaaataccacagtttattgaaattttaaagagtacagagagctgtggtgttgtgtagagaaattgagggggaaataaaattaggtttgtatatggtatttttgaaacaaagaggaacctgattggcatagttaacatttgaagaatatagctaaaaatattgcgccagaataataagccctggtatcaaaacatatgaaatgagaattagcatttcctgagagaaaattaaaactatagaattaaagaaagcaccatctgaataggaaaagagccatttgtggtagagtagagtttggaaactgagaggtgcctacatttcattagatgatgctatgctcttttgaaatgatgatacagggtgtaccaatgatcttctccctttccgttccttaaaaatgcttataaagtggcttaaaacaaaggaaaatattagcaatgaaaatgattactaaagtgaatcatatgcaatcaaaagtttaaaaacttttgtagaagaaaaaattatgaaactaaaatttaaaaaaaaagcaccatgtggaagacctattaaaaggcacagatgctcaaaagaactcctaaaagatatttcaacgttgcactttctctgaataacatacttataaaaagtcacacagataacctaaaattaaaagtttatacaaagatagagcaatgataataaatatgagaaagcaaaagcttttgtatattatcaaataatatcttattttatcaaataatatcatattttatcaaataattaaaacatattatgtgaaataaatgggtggttatacaaagataaatacagtacatacttaacacataataattgtgaatttatatgcaccaaataacatggcaacaaaacacaaaaagtgagggatagaagaacttcaagtagaagctaacaaaaatttagttacggagcagcattaaatttcttgtaatcaagaccacaacaggtaaagtaaataaaatcctgcagtctgtaagtttgatatactctccttataagtattcagagaacacttattactcttatcacttgctagtttacataagatcaaatgaataaatatcaccagaagttttacaggctgtactgtgaccaaaatacaaccaaaatttgaaagtaaatgccttaagaataaacaaacaaaattgaaaattactgcaatattttaaagtagtccctcaaagaacaactgggataatgggaaaacaaagaattcaataaagacaatttaggaaataataacaatatactacatttcaagatctataaaagtcaatgcttagagaacaagttaatgacagctttaaatatttttattgttaatatgaaaaagaaaaagtaaatttattattcaatattacatcttagggaaaaaagaacacaataaaagaataaaaaagttataaattggaaggcaagaaaataaacagtaaactaaggcaagagctgattccttgaaactttgataatagacaaacctgtgataaatctaatttagaaaaacaaaacaaaaaaaagccaaacataaaaagtagaaattagaaatgaaacagaaaccctatagacataaaaattataagaaatcaatgttgataattctgcaactgtatttgtagctctcaaggaaatgggtaatttcacacaaaaatagaagtttctaaagttgaagcgagatgaagaaaatctttatacattaataagagaggaatacattcagaaaatcatcaaagaactattaagatttcaagaaagagggctctgaatctgacagataattacaaaaatattttaaagaaataaataatactgttttacaatgagtattcctgacagagaaacacttattatactaccgataaggataagcaccccaaacaactagccaaggtcataaaaacagatggggaaatcttaaatgaaacccattaaaaagacattggattatgaagtaaaacgtatccctgaaatgcagggatggttcaatgacaaaatgtaatatggtatgagagaattaaatgaaaatccatacatagccatttccatagatgttgacaagtagtttgacaaaattcagcacacattctaactacacattttttaaaaaaaggctagaggtatattttcttaatatattaatagtttttgtttgtttgtttgttttttgagacagggtctccctctgttacccaggctggagtgcagtgacatgatctcagctcactgcaacctccacctcccaggttcaagtgattctcctgactcagccctctgagtagctgggattacagatgcctgccaccacaccctgctaattgttgtatttttagtagagactaggttttaccatgctggccaggctggtctcgaactcctgacctccagtgatccacccacctcggcctcccaaagtgctgggattacaggcacaaacctctgcgcctggccattttttttttttttaaatcaaggccgggcatgatggctcatgcctgtaatctcagcactttggtaggaaaaggcgggaggattgcttgagcccaagagtttgagaccagcttgggcaacatggcaaaaacctgtctctacaaaacacacaaaaattagctgagtgtggtggtgtgcgcctgtagtcccagtctgggactcaggaggctgaggcaggagaatcgcttgagcccaggaggtcaaggctgcagtgagctgtgattacaccactgcactccagcctgggtgacagaaagagaccctgtctcaaaataaataaataaataaataaataaataaaaaccaagtaacattatagccaatggacaaccttagagacatttctttaaaagcaaaatgaaatttttaaggtgctgccttaatttaaaattgttttgagatgtatattcaataaaataaaatcaaaaattaagaaataagaatatgtaatggacccagcaagacaaaacattcattttcaggtgataaaacatgtaactaaacctgctaaatgttgctggatacagaacaaatcttcgaaatcaatagtatccctgtgtatccgcattaacatttcattaattataataagaaagagtagaaaatccttagaaataagcttaataaggaatagatgcatgaaatacagtgaacagtttactgaaaagtacaaaggaagacatgatggaaggtagaaacatgctgtgtcctgcaagggaacacattttctaaggatggtaattttccccaagttcaattaaaatccccagaagatgttaaacagaacaaaaatagctaacgtaaataattgtaaaaatcattagaaaagaatggtcatgagaagctataaagaatttaagtggcgaccagcccggctgaccgaggtggatataccatgaagctactgaagttttcactcctaagcgctcagggcacagatcctcccagtaatgcctgggaggagctctgtttttctcatggtgatgtgcttttgtaaattttacgtcagtaaatattttcttcatgagataccacccctcacccaattgtataagttttgggtgtcacaatacttgaagccaccatgccagatataaaatgatgttctaaatctataataattaaaagacagctggctgggtgtggttgctcacacctgtaattccagcagtttgggaggccgaggtgggcggatcacctgaggtcacgagttcgagaccagcctggccaacatgctgaaaccccatctctacaaaaatacaaaaattagctgggcgtgttggtgtgcacctgtagtcccagctactcaggaggctgaggcaggagaattgcttgaacctgggaggcgaaggttgcagttgagctgagactgcaccactgcactccagcatgggcagcaagagtgaaactctgtctcaaaaaaaaaaaaaaaaaaaaaaaaagaaagaaaaaataggtcaatagaacagaaacgccagaagtaaataaaatgatatgtaaaatgtaaatatgtcacatatacaccatggaatactatgcacccataaaaaagaatgagttcatgtcctttggagggacatggatgaagctggaagccatcattctcagcaaactaacacaggaacagaaaaccaaacaccgcatgttctcactcatacgtgggagttgaacaatgagaacacatggacaccgggaggggaacatcacacactgagacctgtttggggggcagggggcaaggggagggagagcattaggacaaatacctaatgcatgtggggcttaaaatgtaggtgacgggttgataggtgcagcaaaccaccacagtgcatgtatacctatgtgacaaacgtgcacgttctgcacttatattctgaacttaaagtacaataaaatacaagaaaggagagaaaaaataaatatgggagatagtgtcataaaaatatgaaagaacgcaagaacacattatttaatatatggtattgggtgcagctaggtgatgttcaaaatagtaacaactggtgtggcatgggcacaatgcactgacaggtaacaacagttactggccattcccaacatatgctgctgaaccagtgtgtatggacttcatgtcatccctgctataacttaggaaattgggaaatgcactttatttatttgttttgagacaaaatctcactctgtcgcccaggctggggtgctgtggtgtgagctcagctcactgcaacctccggctcccgggttcaagcgattctcatgcctcagcttcccgggtagctgggattacaggcacatgccaccaagactggctaatgtttgtatttttagtagaaatggggtttcaccatgttggccaggctggtcttgaactcctgacctcaagggatccagccacttcagcctcccaaagtactgggattacaggcatgagccaccaggccgggccagggaattgcactttagatctatactgtatgctatgttgagctccaggtggattggcacattaaatttaagatactcctcatgcctgtagtcccaacactttgggaggctgaggcaggcaggtcaggagtttgagatcagcctggccaacatagtgaaaccccatctctgctaaaaatacaaaaattagctgggtgtggtggtgggcgcctgtaatccagctacttgggaggctgaggcaagagaatcttttgaacctaggaggcagaggttgcagtgagccgagattgtgacactgccctccagcctgggcaacagagtgggactccatctcaagcaaataaaaaaatttaaaatactcgattctagactttctaagaatagaagcaataaaagaagccaaacattttaataattagaatgtagagcatttttataaaatgaaaattaacaaaaatcaaaaaggaaactatttgggaaaaaaatgtgagcatcaaatatggcaaggggttaatatttaaagaaaccactttaatatataccaataatgtggagggtctgatgaacaaagaaacaaaggtcataagtggacgattaacacaagagcgaggagtaaacgaacatatggagagatgtggggcttctggattgggtaaagacatgccacgtgaggtaacagtggggtgccatttaaactgttcacacgagtgatatgtttaaaaagatgcatattgctgctaacgctgcagttgtactagtaactggcatggtatagttcaattattttacttgcttataattttctcttgaacagacataggagaaatatatattggcaatataaaagtagaataataaaaatgtttttgcctttttgccccataatcctgtatttgagaagaagcatggcatggggaagagagcatggaatttcgagttggaaattctaggtttgaagccaggttttaatacttgcaagctgggcaatcccgggaaagttgcttaattttctctctggtccttagttttctcttttgcaaagtcaggattatcatatgtgcctcagagggtttggctgaaggttaaatgcaatagcctgggtataaatggaagaacttaacatttctatggcactttgttcctttgttcatgaatctcagtttccttgtctgtaacatgggataataatacctgtctcacagtcagaagagataatgtattcattcacacacggattcattcattcaaccttgagggtttaggagtgacttggtgctgacctaggtgctggccatacggaggcagatgaagcaaacccagtcagccattccctttccagctggagctgagtccagagatgggcttgtcatgtggtcatcatgccacaggtctcaacaaacacaaacacgctgtaattagctaggatgactctgccatccagggcacattcagtgctcctcaaaagagagtccacagttatatttcttttgtgtgtcctctgtatagaacagaggctcaaatgaatattccattcatcgggtgcatgcatgcataaatgtctacaggagggtcatttgttttaatgaacaatctgaagtcacctaaatgtccaatataagaggagtggctaggccagtgggattgtaatcacacagcagaagactttgcagtcattaaaatggaaaattctgagcatcacaaaagacacagaaaaatatctgatataatattacacaggaacaaaagtagaatacaaaatgacacgaacttcacaattataaatatatgtccagaatcagagggaatattgaaaagcaaacattttattacagcagtgagattctgggtgaatttaaaaaattccttttatgatgtgaaaatattgtgttagcaataaaataacaactaccagaaagaaaatggctgctgtgcagagagaaaaatagatgaatttattaaatttttttggttgaagtataacttacaaatggtaaagtgcacctaaatgtacactcaatgaattttcccatatacacacctgcctaaatgtacactcagctaatttttccatatgtgcacacctgcctaaatgtacattcaatgaagttttccatatgtatacacctgcctaaatgtacactcgatgaatttttacgtatatatacacctgcttaacctccacccaattcaagttataggacattaaaaatgggtgattttaagtgggagaaaatagctttggtgtatgttgtgagggtggacataaaatcaatagacagtattattttgcaaaaaatatcagtcttcctaatgtgaagataaaatgttagaatacattaaaacagcagagaatgtaaggcccatttttagagggagttcagaagttgatagattatccgaggaaaacaaagtgaacagacttttttccccctttttatactaaacggcccaaatggaggaaaatcactttcaaatgattacatataatatgcataacgacaaatccgacactgccaaaatcatatgcacaacctcagttttccttccggcaagataaacaaatcgacaccgataaatctgagtggaaacagggctgtcaaatgttatcttccggacttgggattagaaacaaggggaatgtcgcagaagtcatttggcaccaggagggctgtgcatgcccttgtctctctgcctcatcctttgctgcactttcctccaatacgtgagtacatatgtatatatttctctcacagcccctcctaattcccaaaccacaaacaccgaagccttatataatttcactgtgatttcttttctgtttttgatttatctgaagtgttgcttgactgctttatctttctctacacagcctcttaaattgcttcagcagatctaacctctccagagaccggagacaggcacaaagctttacgccggacactgccaggcccacgtccgtgtgggcgttgaatggatgctacgtgatggcagaatgagtcactgagatttaggcggagagtttggaggaaggtgctaatgaaaagggctctggtgctgcaggagacatacgcaggtcaggaataatgacgtcagcccggagccagtgtttaaaaatagtgaagctcttctatgaatcaaaatgattctatggggaaaaaactaaactggtgatggaaggttatattgctttgtaaaagaaaaagtaatttatgctcgacttcaagaaaagcaaaagttacaaatcaaaataaactcagaagtgcttgaagtaggcagaaactcatcaaaacagttggagtgaacttaccatgttctgtacactaactaaagaaaattgctaggggatagtgaatagcaaagatgcctggcttccttccctatcgcagtcacctctgcaagtaggattaccagcttctgctttgtgacagcttttgctgtttctgatgggtccttatgctgagggtacagtcgacagaccattcactgctgaagctgtcagaattaaccccaaagaaaaacggagctgaataggctttatgattacataacatgcctagacttgaccagcccaggctgtttgtttatatatgtctggcatgccagattcgacctggcttaagtggtacctgctttaattaatttaattggttttcttttcttgatggaaaatagaaagatatttaactactccaaaatctcttccctaccccatgaaagcctttgtaaattctatttgatgaggtggttaagttattcagtgaatgattctatgcaagcatatactcacaaaaataatatttaaacaatactatagctgacatggaataaataccaaataactagtcagaccacatctgtacttttacagttgatcttagccaaaggctaagaagcaatgcacctctgtacttctaaatacaaaatcaattctgcaacataaaaacattcacctatgggaattgggattttggctttcttttagtaattcataagcttgtggtaataagtataaaaacaggaattaccaactgagtaaaaatttttctatctataaaaactaagcaaagccaataattaaatactgtagtttttgaaagtttagttttaaaatttgtctttttataaaattagccgtgatatatatttttaaatgactaaatagtacagcaggctagagatcttatttatttatttatttttttggagacagagtcttgctctgttgcccaggctggagtgcagtggcacgatctcggctcactgtaacctctgcctcccaggttcaagcgattctcttgcctcagcctccctagtagctgggattacaggcgccgccaccatgcccggctaatatttttgtatttttagtagagatggggtttcaccatgttggccaggttggtttccaactcctgacctcaagtgatccgcccaccttggcctcccaaagtgctgggattacaggcatcagccaccaggcccgcccgagatcttattttttttcttaaataacctggagcaacttaataataaaaacaaacaagttaactttagttcctgttgttcgctttatacattatcaaggtgttgccataaaatatgagatgaaggtagaaatggttttaatgaggcatgcttgatttttcttagtttgtttcatgcacattttatctgtatgacaaaatatcaatgtggaattaaatattatacagaaagaggatatagaaagcaagcacattttatttttgcttttattctttcccattgcactcagtactataaatgagttgcaaatgaggtacagctacaagtaatgaaattgtgctgtttggtacagttctaataatttatatcaatgaaacatagtaaccgttgcatggaaagtgtgactccatctacacagacggcagcacaaatagataaaggaaacctgagttgggattacataacgataagagtatgcaacataaaatactgtgggttgcattaaatttttttttaaaattatgtggatatcaagaaaggcaaagaatttgactgcataactggaaattatgcctctaattctctaattatcgccaagctaatttataatggaagagcaggatgagaaagataatcatgtcttcaaatgaagtatcatgatttctcaggggtgagctacattctgtgtcacactggaaaagagacagacattgcccttttcttctaaaaggatttagacacatagaacacatttgtcctctaataattgcatacctcaaattgcttcaatcctaaataaataggcagctatttatttaggattgaagcaatttggggtatgtgatgatttagaatggtctaaaaatcaaatagtcttaagaacaactttgcatcctttccaagctattctgaacaattgattctatgtattagatgcaatttttcaaccttttatgttgctaaagatgttcgtttgcctcagaataaataacaagcatcctgcctgtaagacagagtaatatttttaccttcatgattatgaaagattaaacagaaatattttaaaagacatattttagaaggtaatataatccagaaactgcaatttattatccatgtctgacataaaataaaaatttatctgacataagaagaaaaaagaaaagtgactgggaattcagatcaaagagtcaacagaagcggactaagaggtcatccaggtattgcagttagcaaacaagtacttccaaatacctacgattaagatgctaaagaaaatagagacaactgtggacaaaacagataaaagatgaggtattttaaaatgaattggatgtatcaaagagcttgtagtactggttatgatctccaatacaatgttgactagaagtggcaatggtggttcttcctatcttgctcctgagctcaggaatgatgttagctaaaaggtttctgtagctgtacctttaaggtctgggcactgtgctatctttaagttatacttccataaaaatcgaaacaaatcttaggagatatttttcatttataagttaaactgttccaaagggggataacctctgtctcttttacttaaaaaatgcaaatatgctcaatctaatctcttttcaatttctgagaattgcagtttcaagaattattactgacatcagctacaaataaaacaagaaaacaactgtttagaaacctcaaaattgatataaaactattctggtcaagacatttttattaaaatattgttctgaaatttggcagttgatttctggtctcatcatgatgccaaaaatagattaaatagattcagtgagctatctagatgggccaaataacagatttgataaagtccctactacgtgtttaggcagtgacatttgtcagtagccagcacagtaatagttataagtgacaattcggggaagagtctgggctgagagcgtcagttcccatcatgtggctcagtctccattccctctcagcctagactgaaacataaaagaagcaaagtgctttcaagcctgcataggaaggtgtcttcttctcttacccctggaatcaaagaagcgatgaaaatctttgtttattgctttcgttagagactcaaacacaggctatcaaatgtgcaaaaacgttttctttcacataaaagatttctgatagccatgtcacttgtttcaatttcctgttcattccagataccgctgtctgggaatgggattcaaatggaagatatcttgcatttatcccaaaacattcagctacctgacatgaaatatgatgggacattcttttaacttgtttatttctttggatttttttttttttttttttttcacatcatctccagtgtttcagttttcttagcagccagaggcttctcctgagtgtctcttctgggtaaaggtggccagggctgccgcaggctcaggccacatgctgtctgtaaatggctttgcaggcacatgatagacacagattcaattcttgcttcctgatttcctgcacgtcattttggagctaacatacctccatgtacagaggccctggggaagaatgcatactgatgctcttgagcagggtgcacacattggggcccaagggccaaatctggccagctctctgtttttgtatggctcccaagctaagaatcatcatatttttgaatggtaggaaaaaaatcaaaaggagaataatgctttctgacacatgaaaatgatacaaaattcaaatttcattgtctataaataactggaacggagccacgtacgctcattcatattgtccatggtggcttttgcaccccaatggcaaagttgactaacttagtcagaggcctttggtctgcaaagcctaaaatatttactatgtagccatttacagaagaagtttgcctattgttatggattaaacgatgtccccaaaaaagatgttgatgttctaaccaccagtacttgtgaatgtggccttatttggaaaaagggtctttgcagatgatcaagttaagttgaggtccttagggtgaaccctaaaccaatatgtatccttataaagtcagaaaatctggaaatacacacacacacatgcagagaatgccatgtgaagatggaggcagagatagagctgatgcttctattatacaagccaaagaatgctaaatgttgccagcaaaacaccagaagcttccaaagaggcctggaacagattctctcttgccgctgtcagaaggagccaaccctgctgacactttggtcttggacttccagccggcagaactgtgagacaagaaacttctgttatttaagtccctctctctgtggtgctttgttatgcaagctggagcagcatgtaccagctcctgatgtaaacacacacattatccactgaaaggtgctaatgcccttttcactacattgggttcttaaaagtgtctgctgtgaacaaatgccacacatgtcacctccgtttcttcctgttgccacctgtggaaaggccatggggagtggcttggacgctctctcagtgatgaggctctctcagggatgctgactccctctatgccctccgaaactccccacaagtgacaagcactttatttttctcaatagcgaatcaagaactgtcagttaaactcccacttgaaccaacttctcatagcctcctattcaaaaattatatttaaaaaaaaatctttcttttaaaagataaaacaaggatggctgcacgtgattttctctctaccaatattttcaagaacatacaccagtggaagtgcccagtaggatcccagaatttaggggaagtttcagtgtttcattttaatattccaaacaataaaatgaggaaatgaaatgttttggttccttttagaacctgttaaggagccaaacatgcttttaaatgagggctcaattaaaatatcggatggaagcaaaagatcatttagaaacaacaataaattctcctgatctgccttttacaattagttacttacagtttaaaaaatgccaaaatcatttctagaagtcattccaatataggcataagttgtcaatgtaatgcaatatgaatacctaaatatgcataaaaagacaaacaaggagttgcttattcaccttaataacagggctttgggattcttttgtaaatgattcattttataaatgtttggtggttgtatattgttctagaatacatctgttgcaaaaaaaacaaaaaacaaaaaactaaaaaccctccaattcccaatcaaacaaaagatttactgagaaactttgagatgcccagttctaattctggtgcaatgggaacaaacttatactgagacataaactttgacctcagtgaatttatgggattcatttttagcctgcttgcaaagattagaaaattatatagccaaagactaaatggatggaaagacttgtatgtacagttggtattccaaacagacaaaaatccttgcaactgtcatgaaactacagggaggagatggacaagattcagctgcagtgtgaaggaggggtatgacctggagagacacaaaggggggagacgaaggattttgtgtggtgcacaccagacccagaacccactgtacttggaatggtgactgtaaggttcctcgccaaacagtgagcttcctgagggcaggagctgtgttttgttacttttttggtcactagctcctggcatcggactgcacacagaaatggggctcaatggctgacggattgaattaatgatagtcagaatcccagcaatatagaaataaatgaaggagctggaatgttgggagtccccaaacataaaaagtctttatctccaaaagttacttaccagggttttggactcagaattcatttattaccaaaaaaatcctgtaaacactgatcaccttcctgcaataaattttggcctgtgcacaaaatttaaaggggcaccaaaaacctcagtaatcaaggtaaataatattttaatgcaacatatgttttaaaataaaaatcaatgccaaaaactcatgataaacaaaatatcagcattttaaataaaaacaggattggtattattgacttttcttgtttccagagggtaaaatatgccggtttttttttttttttttttttgagacagagtctcactctgtcgcccaggctggagtgcagtggcatgatctcggctcactgcaactcctgcctccaggtttcaggcgattctcctgcctcagcctcccgagtagctgggactgcaggtacacgacaccacgcctggctaatttttgtgtttttagtagagacgaggtttcaccatgttggccaggctggtcttgaactcctgacctcgtgatccaccggcctcgacctcccaaagtgctaggattacagccacgagccaccacgcccggccgacgtatgctctgtactgttaccatgcagctgaggctggtaagatgaaggccagaattgccagtgaccacttttgtcatgatgtggagagctcagactgagaatgaaatcacagagattccattaaataaactctatggaataatagaaataatgcaaaagagttatgtattgataattacaaaggaagcagtagaaataatgccattgcaattcaactacatttaatgatgccaggattctcaaagaattgtttgccattctgtgcatggagaaacacgttccattcttttaggaagagagaataaagaagaaaactgataaagctgagaagagcttggggaaagcaaggcagttaaaaggaatagcccgcttgttggcacagcaagggcaagtcagagtgggactggtttgctactcagctctccatttgattagaaaggaccaaaatccaattcaaactggcttaaacaaaaaaggggagtgaggttcccaatacaaaaaacccagcagaacttccttcaggcatgagtagatccagggactcaaatgtgacatcagaacttagttcctttttgcctcttgcttctgctttcatctctgtggtttcattctcaatctgagctttccatatcacagcaaacagggcctctggcaatactggcctttatcctaccagcctcagctgcatgggaacagcagagagcatgtttcccccactagcaacaagaaaagtcaataataccgatcctgtctttatgtaaaatgatgatattttgtttatcatgagttttttggcattgatttttattttaaaacatacatttcattggctgggcatggtgactcacacctgtaattccagcactttgggaagccaagggcgggtggatcacctgaggtcaggagttcgagactagcctggccaacatggtgaaaccccgtctctactaaaaatacaaaaattagctgggtgtggtggcatccgcctgtaatctcagctacttgggaggctgaggcaggagaattgcttgaacctgggaggtggaggttgcagtgagctgagatcgtgccactgcactccagcctggaaaacagagcaagactccatctcaaaaacaaacaaaaaaacccatacatttcattaagatattatttaccttgattactgaggtttttggcacccctttaaattttgtgcacaggccaatgccctcctctctttccagcctgtcctggctacacctgcaacattactctgaccctccacaccctccagatcctaaaccatatattttgccccaaggtatctgctatggctgaattgtgcatcccaaaagatatgttgaagttctaacagcctgtacctaggaatgtgatcttctttggaaatagggcatttgcaagtataatcaaactaagataaagtcaatagggtgggtcctcgtgcaatatgactggaatccttatcagaagagggaaacaccatgtgaagacagagacaccgggagaagatggccatgacaatggaggcagaggctggagggatgcgtctgcaagccgaagaaggctgaggattcctggcagcactgggagccagaagaggcaagggcagattctcccccgaaggtttcagagggagcatggccttgccaacaccttgacttctagcctccagaactaggggagaatccatctctgttatttggggacccctgctccctttcttttagtgctttatcactgcattcctagggaacgaatacagtccccaatctagggccttctctttggctttatccttgggatccagagactctagaaccatatgtgagcttctctatatcatcttcacaattttctctccctctgtccactgcttaaatgttgatgtgcccttggattcccctgtaaagtcttcgatgggactcttctagacaatctcccctctactatctaagaaggaaaaaaaaaaacttgctcccatgaactggcagcaagaggggccactaatcagccaagaattgctgggtggggagtttcagagtaaactgaaggcacccagcaagctgtggcatggattattgcagcatcctacaggacagagctgagaaaatggcagtgggtcagcctgggctggggaatgcagagcactcattattgagacgtgcaacttcaaagttaccttttactctaccctagctagttacccaggtataaatcctattgttcttccttcgaaatatattttgccgctagttacccagactggaaacctcagttcccatgagagttcctccccgttttcacccatctttttctaatcagttgtcaagctctaactttcagttattgtcactactgtggccactgttcaagttcagagaccttaaacaaaaatgttgccaaagtcacatgctaataacttgaagatccgttggccccaagccccatccttctcccctaatgacacaagatctcaagttttgtccttggacagtcaagcctcgtgtcagtactggcacagagcgatgcttcataaatgtttcctgactgaatgaagaatcatgcattttcctctcatttcacttagtagcatcttccaaacaggatgttttttagacttttaggacttccttattatttggtcacatagggcctgatcttctacattgtttcatgttgctacctttaagaaaaaacagggcatacattgaatttgaatttatgccctgtttaagaaaaacagggcatacattgaatttcacagcaagctgttgagtacatggaattgccattaggggttcataaacctcttttttgggaagatgggtgggtgggagaggtaacagcagggaaagatgagcttaggaaacataattcttaggctggggaggaagcatgggttgcaaagcggcacagaggagggccccataagtaatctctaaagctatggccactaagaggaatgggaaggatcttgccagttagaaatgacagtgatgacaggaacaaacaccagataaaaacaagtcaccagtaatacagattaaatgaaagcaatgcatggttctttctatctcccagaaacaaataaagaacagctaagaccagttcagaaacactactgaaaaagtggaatttttttccttatgcactttgccaaggagttatttgcatctattgttatttactttggcttcactatttgatcctatgaattcttaaaaagtgagaatcaaaatcaagccagtttcagtgaaggactagcatactgtgttaggaagcctgaaatgtattccgatgaaagatacacaaaacgctcatcactaacacagacacaccatatgcatcttatctaatgtgagcactctacatatgaactcttatgcctaaaattcagtatgcatttattgtatatgctttattctgatcaactcagtagtgcttctgagatagaaaaacttgccaggtatccttccagcttttcggcaccaagttggggaaaaacagctttcagaattaccgtgctgaactttgacgctactctgagaaagttactgcctaattctacatctcttacgcaaactgggtggcgcacgatttcatttcaacttattaagtcaattacctgaaaaatagacaccaaattacaatgtatactgtttttcccactttatagagaatcaaaatgtcagaggtaggtgggatttaaaaagttttctgcttatgaatgatacataatttcaaatgactcatagcacttgttgaaataaagtatccaacctggctgactcataacactgacgctggagtttcaaatagggtttccattatcacacaaattgacccaatctatgcattgcacagagttattctgaccacaacaaattactagtgaccaggctatcgatcatttaaacaagcaatgctatcacaagataatacactcaattacttaaccccatctgcgagttctataggaactactttcataactttaacagaatgctctgggatacattttaaaatcttttataattcagactccattgtcaagctctgatgaaaaagtggggctctttattcgcctgtaattttgcaaatggcttcatttcttctacaagtacatgcaagacattttggatagtttaagaacaccggttttcttaaaaacgctgtgtgagaaatgtggatgtctggaaatgaaaaaaagccagatggctttatttgtttcatctccttttgcacctacagagcctgaagaagatcatacaatgcgttcttcactttggtgtcttttcaacgaagattgaggagaaaaatagaaccctaaataattaagactgactcatacttgtccgctcacagcaatgttctacccactaacttataacacctttatgaaaagtcagatcctctacatttcaatttcctattacaatacagaagatggacattttagcagcaagacttcaaaggggaaaacttcagacacagactgagtgcactttgcattctgtcatttataaaagagagacactaatggatttaagcaaggaaggtgagtgggctagcttttattcaagtcctgtatctgtattattcggtgttgccgtcatcaacaacaccttttctatgggaagagggtgcccattaatttttttttccccaaaagaaaacttctctgcagggatttcaaagttctgaggaagcagtaagaatcttccatgagctgattctttagttttctagggttctcatacaaaaatgatctattcttttgatcagcatttcctgaattttgctatgtgcaaagtgaaatggcacttggcctcatgaagtttaccctctggtaggagagaaagattcttaacaagcaaaccctctattaatcataaagcatgataggtcacgagacatacaagcatggcagagagacaggaggccaggtgggaatagggatggagggaggttgcttccctacttaggacaggttattcagctacccaaggaggggacacctaacctggagtctgaaggatggaaagaatctagcctcctggtgagcaagaagaacagttttcaggaaaggaaatggggatgctggactccctgaggtctgaatgggtggaggtgggggtggcaggtgttggtagaggaaggagcagcagcattcacacttcttagcctcattccccaacccttgtctcccccttccccaaagaagggaggcaagtcaggttcagagtctggtgaggatgtggggacttgagcccagcaggggtgacagcagcccactgtggggttcagtatgtgcacgtgtgtgttctttagtatgtgcctcagtcttccaagtagctgggactacaggcacaacccccaccgtgcccaacaactgaatatttttaagtgaaaccactgacattttcataacttcactttatcttctagtgaaaagaaggtttcattcttcacacagtgacactgggtgcctcgcacaagccttcacacctctgctctcaggaagggcacagaactgggagctggggtgcttctgagaaaaaaagcagtgatgccacacagtggctcccaccacatggcaggtattatcctgtttctaggaacttccaagtgagattggtagtgttagctcgagttccctgatttattagggttttgtttttttttgttttgttgttgttttgtttgtttttttttttgagacagggtctggctctttcacccagactggagtgtggtggtgtgatcacggctcactgtagcctccaactccttgggctcaagtgatgctcctgcctcagcctcccgagtagctaagcctaaacgcatgcaccgccatgcccagctaatttttaaatgttttgtagagatgagggcgggggagacatactgtgttgcccgggctggtcttgaactactggcctcaatcctcccacctcggcctcccaaagtgctgggattacaggcatgagccaccgtgccaggcctgatttatcattttcagaaagtatttcttttttgcactctccatgaggtctcagcacatcactgtcctagacaagaaaatgaggttctattttctgataagcctagagtgatgtggccgactcaagcctcgtcttgcgcacagagcctttctgggtcagccaagtgtgaacagcttttttcctttgttacaggttcgatagttcttggcctcatttgtaggactttgtgtaatctgctctgtagtgtgattaaatgtatatatgctgtcattagattttgaatacatagaagaaaaaatttgcatctttatccttgctctatttctcagaaaaatgccttaaacaacaattcctcaatacatagttattgaatgtgaatgtcaaatgtattctctattaatagatataattggtgccaaacctaagatttgtgtttcaagtttaagccaggatatacactatatcaatcaggggttctgatcaccagcaacagaaatggattctgattaacttaagaggttaggaatttattggaaggctaccaacagttgacagaaccaatggaaaggcctggaaaattgcctcggaaagtaagcaagcactgcgagaacagaagccaagagcatcaagagtccaggggtctcccccactggcagccacctgtttgtgcacctgccattgctgcccctgggctcctaacctttctgccaccatgttgaatagccttcaggggcttccatttcttggaggcacatcccaacatttcagaaccatgaacaggggagcatgcaatcagctgagcgtatatatgcgcacatatcctggctgccaggaaatggggaggtgatttatctgcaccctgtctcagggtagaactgcatactagacagtttccccgagctatgatggtattatcatgttggagagggagaggaggaggaaggagaaaggagaaggaggacaaagaggaggaggaggaagagaaggagaaaaggagaaggaggaagaaaaagaaggagaaggaggaggagaaaaggaaaaagagaagggggaagaaggagaaggagaaaaaggagggcaaggagaaagagaaagggaagaaggaggaggaggatggggagtaggagggggaggaggaagaggaagggaaggagaagaagaggaaggggaaagggaagaaggagaaaagggggtgggagcaagaggagaaagaatggcagtgtctgctaggttagggaaaaattttgatttttgttaactatgagtttttaaagcagtttgcacgaaaaatttgcttttcacaaaaacaaatcaacccttctgaacaaatttccctaaacattgaaatggttttcatgagtagaaacaggttcagtaactaactatataatctaagtgacaaagtctgtgttaataacacaaacatttaataaaatcaaatgtaaagtataaacacttttcatgtcaatactaagaaagaggaaattctcagaatagaaaccagaaaatgagagagtgagtaattagttctcagaggttgaaagggaagaacaatgtaatacatattctctcattttgctctacggggtgtctccacctgtctcccattcggagataagggaccggttatgacactaacaagtaggtatgcgccaaaagcatgttactagcctaagaatatgaatgacaaatcatgttgttttcccacatggaataaaagtacttttcctagggcagaaatgatttgttcatcatgaccataatgatcatctgtaccatgcgtctaggctagaaattcaccccccacaaaccttccatttactcctaatttccatgaattagttatttcaatgctccccaaatagtctagttgactataaaccttttcatactccttaaactacaataacccttgattttaaaaatagagccttgcattactaatgctataccaatttttaaacaccatgctctgaaaaaataaaagcctattactgtaagttttatattaagtttttctggaagtgggtacatacaaataactgctgtgcaatttcgatgtacaggaataacaaaaaatacttaaaaatgttactcatcttgtccatagaatatttattcttcaattactaattacacgtaggactttcaaggtgcagaaaatgggcacttctttggtaagcagtgacacatgtcatcaactccacaattttactttaggatccacaaagtggaccgccaccaaagaggggggtctttcttgccttggtaatgacaactacatacaccatcatcatcatcttttttttttttttgagatggagtcttgctgtgtcatctaggctggagtgcagtggcgcgatctcggctcactgcaacctctgcctcccgggttcatgcgattctcctgcctcagcctcccgagtaactgggaatccaggtgcctgccaccacacccggctaatttttgtatttttagtagagacagggtttcaccatattgacccggctggtctcgatctcctgaccttgtgatccgcccgcctcggcctcccaaagtgctgggattacaggcatgagccactgcgcccggccctaaactatcatcttcttaacaaaaggttaaagaagcccaacactatgatggtcacacagcagagggaagaacagacactgtctctaacgaacagtaatgatccgttttaaagggtggcatctaattgtccaagggaactacctagttttaggatttaatcaaaccaatgagttattccttaaacccaaattatctttttaaatatttatctacttatttattttttgagacaagttctcactctgtcacccaggctggagtgcagtggagcgatcttggctcactgaaacctcttcttcctgggttcaaatgattctccagacccagcttcctgtgtagctgggactatttatgtaagccaccaatgcccagctaagttttgtattttttagtagagatggggtttcgccatgttggctaggctagtctcgaactcctggcctcaaatgatccacctgcctcggcctcccaaagtgctgggattataggtgtgagccaccatgtccggcccttgaacccaaattattgaacctgaacaacccaatggttatatgtgattgcttataaattaagctgtctccattaaagggcttttcacgtaaatttaaaagtgtcatatctcatggataattttaatgcacagtattggtcgtacgctaaaatataggggaaaattctcacgtgcaaataaataaaggtttgtacaggtttggtaccagcaggttttaatgcagggagtggtgtttttttttttttttctttttcccagagatccagagatattttggaaagaatgagtaacttacaaacaaggagtcaggaatgacaggaatatgacaggaaatgtaaattggatcaatatttctttttttttttctttttcttcttttctttctttcttttttcttttttttgagacagagtctcattctgtcacccaggctagagtgcagtggcatgatcttggcccactgcaacctctgcctcctggattcaagggattctcctgcctcagcctcccaagtagctgggattacaggcgcctgccaccatgcctggctaatttttgaatttttagtagagacagggtttcgccatgttggccaggctgatcttgaactcctgacctcaggtgatccacctgcctcgacctcccaaagtgctgggattacagatgtgagtcactgtgccccgcctggatcaatatttcttgaaggcaatttgtcaatacatgtctgaagccttagctttatttttttctccaagaaatctacttttagggacatatatggaagatacaataaatttatgtaaagattgtgccacgagcatgtccaccatagcattgcttatcaaaacagaaaattactaatttcaatgtccaccctcagggcaccaggtaaaacaaatcgtatgtccacaccgtggcattaaaaatgaggcaggaagggaaatgtaaatccaaaacatgatgagataccatttcatacacactgcgttggccatcatcaaaaactggaaaagaagctttggtgaggattggagaaagtagaatcctcatgcattgccagtaagaatataaaatggtttagcaattgtggaaaacagtttgacagttcttcaaaaattaaacatagaattatcctacaacccaacaattccactcctacctgaatacccaaagaattgaaaacagcaactgaaacaaatacaggtacacgcatgtttatagtagctctattcacaatagccaaaaggtggaaatgacccaagtgtcaatcagcagaggaatggataaacaaacggtgctgtaggcatgcagcagaatgttattctgctataaaggaaggaagttctgatatttgctacaatgtgcatataagccttgaaaaaattatgctaagtgaaagacaccagacacacaaggtaacatattgtgtgattccatttatatgaaacatccagaataaggcaaatccatagagacggaaagactaatggttgccagggggctgggaggaggagtgagccggggagggactgcctaatggatataggttttccttccggcgtgatgaaaatgttctggacctgggtagagggggtggttgtacaacactgtgaatgtactagtgacactgaattgttaatttaaaaatggttaatggttaatgttacgttactttttccctcaagataataaaacgatggagaagaatatttcttgaaaagggaagatgttcaccacatatttggggggaaaagtgtaaaagtagggaaatactatcgcaaggacaaaaaaccaaacaccgcatgttctcactcataggtgggaattgaacaacgagaacacatggacacaggatggggaacatcacacaccggggactgttgtggggtggggggaggggggagggatagcattaggagatatacctaatgtaaatgaagagttaatgggtgcagcacaccaacatggcacatgtatacatatgtaacaaacctgcacgttgtgcacatgtaccctaaaacttaaagtataataataataaaattaaaaaaaagtagggaaataaaagtggatataggaattattgtacttgctaaaataattttataaatcaacactatatataaaaatataaacacatatgaatatgtattttataacatataaagaatacataaacggacaaaggctttacagaaaaaagcccctagtggtgattctcgggtagagggattatgtggtaggattatggttgacttaattgttttcttatctgtccttccaaatatctcataatgagcatgtcatactttgtattaagaaaaaaattgtataggtgatataataaaaataggaatgtaaaatcaggattatgtatgtctgttgactcataacatgcctccatagaatccagtaataacatggatagcttttccatgagctcatctgtatgatcaggcaaatggtgtcctgtgaaacccaatcacgcagtggaaagcaggatataccatgctgagcaaacaagtcaggcaccctcaagtggctccactgtgctattcaaagacttcagcctcttagttgagataatattgaggtaattacagtaacataattaagttatgtgactttggaatgcactaaaaagaaatatacttaaaagaaatagcatgtcaagaaaataagccaacctactgcatttaaataatcctttaacaaaatgtaatttgcttaaaatccttaataagagctcattcttttattcataaagtatatcaaaatgtgatcaattttcctataatgaaataaaatctgatatttgtttactattttttactactatttcaagttgctgttaaaagaaagctacccaaatgaaaatatctgtattttcatcctttaagaaaacttggtaaaaacgaaaaatttcaaaacagggaatcatgtgactatgaattgcatgacattaaaaaaaatggaattattctatgaaagaatgagctttcactgcatttcaaaaaatttcagttttcctgcttctatagttactttaattctttcaggttctctctgtaaacacaattgcttgtctagatgttactaattgttatcatgaaggttcccttctgatctcacctaattttctttcctattagcagaggctgatattcattcatccaaaaagtatttgaggagtgtctaccacattccagaccacatgctcagagcctggtggactgagcatcactggccctaccctcaggccataaatgggctgtccagtgccgagaatagcagtgcctcacaggcatttggtacatatgcattgaatattggccttaggaggagggatcagggtgaacctgtgtgtacacattacagcctctcccagggttgtgggttgtccatgtgaacttgggcattattacatcatggcaggtggataagggctaacatccattgagcatccactgaattctgggcagaacgctgaacgctttacttgcactaggtgattcacatcccattgatctagggactaccatcaccacactctacagatgtgaaaactgaggcccaaggcagttaaatatattacttgcctggggtcacacgtagtgaaatctggcgattgcatcttcctgccaagggcatggagaaagaggaaagtgataaagaccagaggtgtgttcttgggaatgccctccaactaggggaagaggggacaggacagcagagcggcaggagaaagggcatggagggacttcctaaattcctatatgttcaatgaattacgaggatgcttcaagaaaagctggctcacaggaagtttgggctggacgggaaggagggcccagaagcacttggtatctaggaactgggggccttccaaggagtaccttcagctacatgggtaggatatggctgagttcctgggcctaagaaggcggctgagctatggaggcaaggtgtttttcccaaaaggcttggagtggcgggcgtgaatccgcttagagggatgtcttgagtcgggagagaatccaggcaagaattgcttcaggccaggatgagttagcagagaggctgaagacatttgagagctgaaggctggagaaagctccgagaggagctgagagacagggcacagtgacccccagctcagcagagggcaggggaaggagacttttggctccaatggggaactgaagaagacatctgagtaaaatattaggcagtgtgatctggcgtgaggcgggagatgaggtgggcaggcaagactcagcatggctgaatgggcagcttgatggcccaggcacatgctggctcctttgtcattccagagggtgactttctgttccaggctagtgatgccattttttccccattcacggtagtttcataaagttctcttttaaaataaacctatttagataaaataaataaatccattaagggaagaggaaagcaaataatggtacagatggtgcagggatgtggcaaaaattgtgaaggggtgtgggtgagtgaagattggacaacattgcatacaggagcacatttcctagttaaaaatcatttaaaatttaattaaaaaaaatttacagttaattgcttcacctgcaatgctggaaactgtctaggtgggaccgaatctgagccaaaaccaacacccgcccagggagaagagggttgagtccttggcaggggttcccggctgttcttggcagagaatgtggcctggagaagctgtccagctggctcgaacatgtggatttgcagctgtacactcaaaccgggttccatactatttttttttaatgaactagttacccttgtttcagtgccccattaaaatgtttttgggctgggtatggtggctcatgcttttaatcccagcatttgggaagggtgagacaggagaatcgcttgagcccaggaggtcgaggctgcagtgacccttggtcacattgctgcactccagcctgggcaacagagtgagaccctgtctcaaaaaaacaacaaaaaaaatgaggtttatgaaatgcttttcattatgaggattagaaatacttggattttctctgtaatgagaattatgaaaccagttgggccactcagcctctctagcctgggcaacagagtgagaccctgtctcaaaaaaatatatttttttgcctcacgcctgtaatcccagcactttgggaggccaaggtgggtggatcatgaggtcaagagatcaagaccatcctggtcaatatggtgaaaccccgtctctactaaaaatacaaaaattagctgggtatggtgccacgtgcctgtagtcccaagctactcaggaggctgaggcaggagaatcatttgaacccaggaggtggaggttgcagtgagccgagatcgtgctattgcgatccagcctggtgacagagtgagactctgtctcaaaaaaagaaaaaaaaaatttaatgctcctgttcaggcaatattttgttttgtcttactctataacttcaaggcatttcaaaagaaaattaaaaatctttgctctaatgggctaagaagcaaaggaaatggactgatagggtttgatctgacggtgtcctctatggccaacatcattgcgtctctgctgagaacccatagccttttttgattctgggcactgagacataaacaagacctaaagacaaatgccagcttcttattagattttaacctttctttcagattttctttggaatactgaatggactaatcaattttcctattttcattctagaaactcaaatagtacttgccaggtagagatgaaaagacagtaggttccagaaccctttctttcttctaggacatacacggggcacacaagcagttttataagttacaaacatatgcagagaataaaattttaacataaaagaaaagtgtgaaatgcctcataacattaacttttattcatgtatggagaaaaatcactatttccccctatttgcttcatttaaaaatttcctccagtgaaatacaattagttgctgaaaaaaggtaaccctaggaacaaaatgctgtgcacctgtgtcttctagactttcagtggtgttgctgtgccaccctcagctgtcaggtcaaagattagttaggatgaaacttttctggggcagaatgaatgcataattgcatttaaaaatgaatctgcttgatactcaagattacttgcctgctccatccgtgagattcataaagaaattaggtcactcagtaggacataagttcaaaattaagacattccaatttatcatgaggacaaagtacagtttcaaacaaaatcttctacataaagaaagattcagctaaatatccattaacctaaaaattaacaaaggaaaactttgaagacacaaatcgtgattttagggggtcttattttctagacaagttttgaaaacatcaaaacatggttatgtaaactgctttcaaagataagacccttgattactggtgctgcaaaaataggaaacaaatatcaaatgatataaaaacactgaatttgattttacagcacttccttcaaaactccaattaaattaaatgcaaataatgtaagcatatatcagccagaaaggttataatccttctaataaaatccatatggttttaaaggaggttttacatagaaaaagagactttagaaagaaaaaacaaaaaatatgtactggtctaaaactttgaaataacaaccagactgtatgcctgggacagcgtgaattactgtgagtagagaatgctgtttgtattcattttagtgtctgttaggaagttaggcagatagtaattttaaaaaatgggctggtagagttttgctattgatttgtaaaggtgacttgtgtaccatgtgacaaggtatgtaactgatatgacttattcagatgcaatcacaatttaaagatttcatacatttctttataaatattccttaataatccagaaaatatcacataaatactcgtatagtaagaacggaattgtgaactccgtattactactagccattcttagcatgtgaattccagaagtgttttccaaaatggaaggcactgatggagatttactgttcagtattgtaggggttaccaaactatggcccacaagccaaatctggcacgctggtttgttttgtaaataaagttttattgaaacacagccatgcccacttatttacatattggctctggctgcttttgtgttgtaccagcagagtctagtcactgcggcaggatcttctggccccagaatctcaaatattttctctctggccctttacagaaaagcttgccaacctctggcttgtagaatcattcagaattgtgatgatttatatgtactttaatatccaccgtgatagcgaattggcagattaattaattttgtttctctttgctttgttacagtcaaaataaattaggtgtttattttagaacttgtggctgattaatgctcaaaaacaaataagcaaaatcactcatcagaactaaatactctgcaagttattttcacaaaaataaacgaggcggagaataaacaggacaaaaaatgggtaatataaataatgagacacttattcaaagctgaagactaccctcaggctgctaggacaacttaggctctcacaaaaaacgattaaccttgctcggaatgcattcgccctcttttctgtgaagtaaacatttcttgtcaaaggcatcctgacagtggtaattaagttcagaaagttctatactgagtgggagatgtgcctgtattgcttgactttttttttttttttttaatgagaagacaacatctcatggtagagagctgaactttcaattttacaggcgaattctaccagtttataaatttgggatgcaactgtaaataaatacataataaatgttctctaaaatacaagatataggtaataagagttaagaggaaaataattgcagtgatcaaaacaaaatttaaaaatagaggtaaaatgaatggcttggagcatctcataggctgggagaatgctctgaacccatgcatcgccccggtcagaaggaccaccagggggcgccttgtttctaagctttccctaggggttgttcttggttaagattcctggattggtaaagattctttgccgtgtttggagagatcctgaaactgattaatcaactctgaggctttcagttccttgccaatgatccaacagatccatcccagtgggatggttatgtcccttagatttaggaacctgtattttaattaatatagctttcaagctacaaagttttgtaaaacctatagtcaagtgcagccctggatctttttcatatgaatttgtgcttaggttaagatttattccccgaagaactgtttatggaaaaccagaggatgtatattagagttctgggaatctagtgtctcttttcttcatcctcagagtatgtgaccttgagccaatggcttgacctcctcaggctccaacttccctaactgccacttttgcaagctgagtttataaacatgagttgagataatgcctgtggaatgtctggcacatagtgggtgcttcataccctttatcaagtttctgttatcctttattgtattaaaacaaataacagagatccagggttttatgttcatgcctgttaaatttcttcctaatttcagttcatctttcattttctttttctttttttctttttttttgagacggggtctcgctctgtcacccaggctggagtgcagtggcacgatcttggttcactgcagcctctgcctcccaggttcaagcaattctcccacctcagcctctcgagtagttgggattacaggggtgcaccaccacacttgcctgatttttgcatttttagtagagacggggtttcaccatgttggccaggctggcctcaaactcctgacctcaggagatccacccacctcagcctcccaaagtgctgggattacaggtatgaaccactgtgcccggcctcagttcatctttcaatggtaaaaatccttctgaatcttcatttattctgacaaaggacgagtgttcccttccagtcctgggatacctctaacttggattttcatttttccaagccttcatcctagttcaacattcacagtcaagtggagctccaaggtgcaaaaccaggcattctccttccaggttgatagcaactgacactttttggggaaagcctgtcatgagtgatacattggggaagccaaggtcaagggcaaagagggcaatgaccatcactggggatgctcaccgggtcctgggcctaaagtccactctcccaggtcctcctgctttcctgttggatgccagtcacacaccctgatcttttggtggcccctggtgtcttcccactttgctaagcctttgatggcttggttctgagatgcatgtgtcctcactgcctcaaatagcgaagagggacccgtgttgtccatctttcgtctgtgtctgttctcctcatttctctgggtgtaccatgtccagcgctgaggattggttttcttcctaacagtcaaaacatttgtctcagtctgccttggacaatctgactttgtagtgctcacagagctttatcatttgcctcacagtagatggagtttttaaagtctttttttttttttttacttctttttatcaagttactggcaacaaattcccagggcctggctcagagggcatttaaagggtgccacctaggaccacaacagttgcaatttaaatcacaacctagaggcatggtcagtgcagaggaacatacagccttccaagctccggggaagtggcttgtcttatgagtttcacagacagggtaaggagttggggaatctggtcccaaaggtctgtgagtcttcaaagttcctcttactgtttctcccaagaggccttatgagtcctcaggcaaacatagctattgatgacctgatctggcagctcatacccttctggagctgggctccaaaagagattcccaatgcgtcaatgcatggtctttaatgtatcactgaccttacactacaagaaagaatgctgggggcagtacaatacattttagaaatacctctatcagtgaattaacttttcccttaaacagttattattaaagtgaaattcacacaacataaaataaccattttaaagtgaacaattcagtgacatttagtgcatgctcaatgtcatacaaacaccgctctttctgctttcacatattcatcaaccccaaaagaaaccctgtaccaataaacaattacccctcattcctcctccttccaggctggaaactaccaatctgcatcctgtctctatggatttatgtattccaaatatttcatataaataaaattgtacaacacgtgacattttgtgtctggcttgttccacttagttatagcctgtgtcagtggttcattccttttcacggctgattactattccattgtatgcacatatcacaatttgtttatgatcatcagttgatggacatttgggctgtttgcaccttttgcctattgtgaatagtgttgatatgaacattcacgcacaagtttttgtttgaatacctgttttcaaccattttggctatgtatctaagagtgtaatggctgggtcatatgataattctgtgtttaacttattgaagaaggattaatttttgtgcattttaaaattgtttgtatttttgttgttgagttgtaagagtactttatatattctggatactagatccttatcaaatatatgacttgcaaatatttttttttcgtggattgtcttttcacttttttgataatgtcataattactttttgccttttgtaaaagtcaggtttattaaggtttatttacatataataacatttaccctttcaaaggattcagcagcatgacttttggcaaatatatatagatatgcagccgccagagtcaagatgtaatatttgcaccaccacaaaaaggttctcttgggcccttttgaagttaattccctcccagtgctaattacttgttaagttttgttattaaactaatttttaattttctaaaataattaactactgtggaaaacctaactaacaaatactagatcaatgatgcaccattgtagtatttgtattgaccctgtgcagcttgaagagtattgacattttatagtttgaatttactctttcctgggacccagctgcaagggtaacacttgtttcagctgtacagacttggagtgccagcaggaagcactgaagccggctcttctctcctgatgattctccaagaagattcactctggtacgaatgcagaggcagattccactgtaaaatacattccatcaaattgttccacatgcattcttcatacatctagggcataggcagaactatttctttcacagtgtttttttctaaagacaaaacaggactaatgatttttctggtgtttcaacagacaaaggaggctgggcgtgttggctcacacctgtaattccagctctttgggaggctgaggctagaggatcacttgagctcaggagttcaagaccagcctgggcaacatagagagaccccatctctacaaaaaataaaaaaattagctggatgtggtggcgtgtgcctatcgtcccagatactcgggaggctgaggtgggaggatggcttgaactcgggaggcagatgctgcagtgagccccaatagtgccactgcactccagcctgggtgacagagtcagactctgtctaagaaaaaaagacaaaggaaactgaaatttgacttcgctctgaccacctgcccctgcttatgaacatctaccctccaccccaaagttccatgttctgccatggagttgctcagtttcttgtcaaaaccagatgttcttgtgctgcctccatcctgcagagggggttcaggcattatttgaaccctttatttgagctaggttgaattggtctagatttctaaaacttagaagagcctgatccatagaactgatacatggagggaggtttcacagaataggcctcaagaagaaatgtgggattcttataagatcatcaggacacagtcagtaggtgacagggagaatagcctccaaatcttacactgagaagttcgtgatctgtgttggcaaaacagtaaatagaaacaccttgatgctcaagtcacgtgcttttaagtctttctgagtgtacgggataaaaaaattggcagcgtgcgatgcttcctcacgcagctgggtcttggtgttcatgtcatttaccacatcacattgaaatgatctgtttacatgtctgtcgtccacactagattgccatctcttcaggggctgggccagttttatttgaccttgttttcacaaggtctctgtaatgtctcgacagtgggggacactcagcccctgtttccaaggacccaggctgtatcaccttctgcactcaaaatggttcgcaaacactatatcatcagttataccttctgtgggctgtttctgtcttctcacctctccttagtatctctgctatctctgaaactaccttcatttaaattactttcctagtatctttgaagtaggcaagtagatatttaatgctgaagtccaaaatattcaggttaataatggaaaagatagctattgctgaacaactaaatgtaaggcatgatattagataatgagccagaaaaataattgctctaaaggacactattgagtccactggtgaagctggaatacagagccacactacatgcattattcatctgccttcctattcattctattatgttttcctcctggttctaactgtagataagagttttatgtcaaggtaaaatttcctgaatttgataacagtattgttatattagaaactgtccttttccttgggaaatgcacactgagctacttaaggataaagagacatgatgtatgcaatttaatctcagatggctcagacagagagagaatttatgataaagggaatgtggcaaaatgctagccatcggtgaatttgggtaaagagtattgggaaccttttgtactattcttgcaacttttatgtaagctaagcattatttctaaataaagttaataaaaagttatttccaagattaaaccttttctttgatattgatactctgtgaataaagagcacaagcaacagttagccaggatggacaggtggaagcgatacgtccttatttatccattcctctagtcctgttcatttttgccctgattctaacttcctcctcttattgtctaagtgtggacatgccccaaggcccctttgcttgcagtctttccctccacacttccttggtgctcttgattccgctcgtggcttctgtcacccaagtatattgcacactgttgtgttcagggtgctagggcaggttgcagaggtttgatttatggttgtgtagataaagcagtgcacagaggtgcttatgacctggatgttcacaaaatcatgtactttaaatgaaattggaaattgtcaagccctcactgtctactcatcatccctgctcctgtttcaagagactaaggaggctgggcatggtggctcacacctgtaatcccagcactttgggaggctgaggcaagaggagagcagttcaagacaagcctaggcaacatggagagatcagagcagactggttttgactttcatcaccattcaaagtaaactatgctagggaatatcaccaaaaacttccaactggaaatctaatggacagtgtccaacctttgttacagtcacctcttaagaagctgtgtaatctagggtaagagtaacagcaaaaacatatagaatttactaatgcaggctctgttctaggcgcttaacatataattaccaatttaattatctcaacaattctagcagcaaattttattatcattctcactttacagcgagaagctggggcatagagaggttgaataactggactaatttagtgagtggtggagctagaaccgtagcttaggaatctatggctttatcataacattacatggcatgcagaatgctcatcatggttcctggtatacagtcagagttcaatccatgttagctattattgttattattagctatcggctctggggtgaaggtctgggtctgatggcctagcaagagctatgctgcccaacacgggttcccagagccacatgtggttgagccctggatatgcggttccttcaaattgagatgtgctttaagtgtaaagtatacactggtttgaagatttaatacacagaaaaaaaaaatcctgataacttgaaaatattttggatatagtgggttcattaagatgcatcattaaaattaattttgcatttttttacctttaaaaatatattcgctaacaaatttaaagttacaaacataattttacgtttttttacgtacgttttttacttaattttacgtacttacattgaatttctattgttccatgttggccttaggcactagagagatagcttgaagcctggagcttccactgggaaaaagcattaggctcggggcactgctcagctgcggatgggagaaaacagagacagtcttggaacaggatcccaaggacctgcacaattgccagcatattcacacactgcccctctaagccagggaattgagggccgcagacgtgaaaggctgcggtgaacttttccattttcagcataattgcttcaaactgtggctgagcaggcaggccccaagcaccacctgccatcaaacactcagaggggtgaagagtcccagcatttcccacctccaggctggcaaaaggcttcagctggcctcaccagaagtcctgcccctcacacggaggccccgcctccttactctcattgagcctgctctgctgctggtccaggtagatttttttctggtcaccttgctgtttccgggttactcgtaaagcttccgggaacatggttgtcttaagctctttaaaacctacctgataacctaatggtttattctcttctccctgggctgaggggtagaggaaaagcgcagaaactcgcacacttgctgcagactcttcctgaagcatctccacctggctgtgccctgtaaactcgtaagtccaatctctccaaaactgttctcgtgcccagtccccataatctttttctcttgtgtgctggtctcagtaaattctccaccactctgggccataccccaggcatcatctcagcctctccttctccttcagtctcctggccaatcaatcaccaagttgtgtgtgttctgccttctaagtatagctggaacctttcctgtggtctgtctcccatcatggtctaggccgtcactgactgtcacctgaatcacagcaaggactctttttctggccttcctgtttgcaatttgacccacacacccccagccaaacactgagcaccagggcgtgtcttcctaaagctgcatctggtggtatcctgtgaatgctgctgtgaagtccaagctcctacagatgatttcccgccaggccttttatcaggtcttgattcttcagcctctttactcacccttctccctctctcactttacagtctagtcatcaaagtcttcttccttttttttttttttttttgcctgaaatccatcaacccagccctctcctaatactacctctgtgccgcctactcccatcctcaccccaaaattttgcctgccaagctgactcttccttaaggtctcagttagccacctcttactctgggagagcatcctcttcccttctaccttcccccataagagcactttgcattctgctttatagactgattttgagcatggactactcctgattcccatctgtggctcaccactagcaaagtgccagggccgtagtagttgtccaataaacacttgttacataaatgaaaggattcccacaactgactgttgctagagggcagcctatctctgggtcaaaaagactctaaagcctagacagatactgacagtcgagccagtatgatttccgacttcttataaaaaatgaaacgtccacgatcaaaggcgatagctctctacaacccaaacttctttcttcttggccagctgatgaaatgttcatctttccaggtcccacagtcactgcctgctctcctttttacttattattattattattattattttttaagggtgaccagtataagagtgggccagtgaaggtgagactggggcaaagttgggtagaaatgatttctgtttagctttggggagtgaagtaacttttcacaattgctaactacttggtacttttctttctttttcttgtcttttttttttcttttttttgagacgaagtctcgttctgttgcccaggatggagtgcaatggcacgatctctgctcactgcaacctcctcctcccaggctcaagctattcttctgcctcagcctcccaagtagctgggattacaggcacacaccaccagcccagccaatttttgtatttttattagagaccgggtttcaccatgttggccaggctggtctcgaactcctgacctcaggtgatctgcctgcctcagcctcccaaagtgctgggattacaagcatgagccaccacgcccggcctactacttggtacttttcatcagcttactcttttcgagcattattcccagattaaatttgagtcattttggaagcccaaaatatcctctgaattattggatgtggctgtaaaatgtgttctcaaggagccccttgtaaatttccatgagcggctgttatcctaagtcatatgaaggcagtaatccatcagagttaccctatgtgcacaaggaaggactgtctagaatctaattttatctctaactctataaacagccaagtggcaccatttattattttacataaatcagccctgagaccaaattctcctttaaatgtgtcctttattcttttccaatacagtactgcctaaaaatccccagtagctcgaaacagttctatggcctttgcatttggggagggagagaggttctggaggaatgagaggagaggagagagacctgagagggaaaaggaaactcctgttcagcacatcagtccaaccaggctttgggcttgcaagccagaacatctagatgaaaagcaaagaagcaagtcaatgaagggcctattctcaacttggctagatgcctttttctattctcatttaacatgtcttttggaaaataagaaattgtaggtctgcattagtcactgttaggaaaacttgtacaggaatttactttctagtgacttgacttggagagtggctggtatccacgggtccttaataaaagccagtgagagaacaggacgctgatgaagactgatgctaaatgggccgtgtgcttcctgtggctctaatggaaatcatggcgtgtttagcttaatggcaatatggaaaatccacttccttctctcagccatttttttaactaatataatattataatacgattctctcttgtttatccccttattttttatagttaaaagtttaatttggagtttaaatgtaatttgaatgctgcctagagctctccagagacaaggtgtgatatcaattccgcagaatggaataattctaattttcacatggtgttggatggcaactagggactaccatgcctcatgactggatatctataagcttctaccaccaacctcagaaacactatcatgagcaagagagaaactgataaaaataaatgtttctctccttccagagtcagttaccagagtggaaattcaacttgttatctctccttgccataccttataggatgaaaatctggtctttaaaaaatatttaggagtaaatagcccagtttcttctttctatttagctatgggctgaatttctgggcaggtaagtcaactgtaaaacgtaatcctttcctgtgtgattttggctgcagtgcttggggacagattatattcttgttgttgtttttgcttgtttgccattctcagtccagtgaattctcctctctaacttccatccacagttaatttacattcccagtatttgacgtccttggatgagatcagaaatggcaaacaactttgaaaactttgtgctcatatggctattaatgcttgcctgttggatgtttttggttttggttcgtttataagctgatattggctgtttctttttttttttttaaaaaaaagaagtagactttattttttacagcagtttcaggtttatagcaaaattgagcagaaagtacagagatttcccatatacctctagctccacacaggcacagcttccgccactgtcaacattctccagcagagtgatacattagctacaattgatgaagctaccttgacacatcattatcacccaaggtccatggtttaaattcggttttattctgggtgtacatcctgtggatttggacaaattcatagtgacatgtatccaccgttacggtgtcatacagagtagtttcactgtcctaaaagtcccgtgctccagcttttcctccctctccccctgctaattcttggcaaccactgatctttttactgtctccatagtttgccttttccagaatgtcatgtagttggaatcatacagtatgtagcctttcagattggcttctttcacttagcaatatacatttaagtttcttccatgtcttttcatggcttggtagctcgtttctttctagcactgaataatatttcattgtctgaatgtatcacagtttatccattcacctactgaaggacatctcggttacttccaagtttttgcagttaagctgctgctgtaaacatccgtgagcaggttttgtgtggacataagttttcaactcttgggtaaataccaaggagcacaattgccatattgtatggtaagagtatgtttagttttgtaagagactgccaaactgtcttccaaaatggctgtgccattttgcttcccaccaggagtgaatgagagtttctgtctatatcctcaccagcatttggcattgtcagtgttctggattttggccattctcagaagcatgtagtggtatcttattactgttttaatttgtatttccctaatgacatttggcgtggatcatcctttcatgtgcttatttgtcatctatagaacttcattgaggtatctgataaagtctttagtctattgtttaatcaggatgtttgttttcttactgttgagttttatttttttttattatttttttttttagatggagtctcacttcgttgcccaggctggagtgtagtggcaggatcttggctcactgcaacctccacctcccgggttcaagcaagtctcctgtttcagcctcctgagtagctggaactacaggcgcctgccaccacgcccggctaatttttgtatttttagtagagacagggtttcaccttgttggtaaggctggtctggaactcctgacctcaggtgatccacccgcctcggcctcccaaagtgtgggatgacaggcatgagccaccgctcccagcctctgttgagttctaagagttctttgtttatctatattttttcattttaagctttattgacaaatgaaaaattgtacagatttatggcatacaatgtaatgtttgatgtacgtatgcatcgcgcaatgattaaatcaaggtaattaacacattcatcacctcacatgtttatcactttttatggtgagaacatttaagacctactctctcagcaattgtcaaatatacgttgcattactatcaactatagtcatcatgctgtacaatagatctccagaactgatacctcctgtctaataaaaaatttgtaccccttgagcaacatctccctgtttaacctttattttaatttcaggggtacatgtgcaagtttgttgtataggtaaacttgtgtcctgggggtctgttgtacagattatttcatcacccaggtattaagcctagtactcactagttatttttcctgatcctctccctccttcctccaccttctgatagaccccaacgtggatttttttcctttgtgtgtccatgtgttctcatcatttaactcccacttacaagtgagaacacgtggtatttggttttctgttcctgcattagtttgctaaggataatggcctccagctgcatccatgtctctacagaggacgtgatctcattcttttccatggctgcatagtattatatggtgcatctgtacaacattttcttaatccagtctatcattgatgggaatttaggttgattccatgtctttgctgttgtgaatagtgctgcaatgaacgtacacatgtgtgtgtctttatgatagaatgattttgtattcctttagggacatacccagtaatgggattgctgggttgaatgggtagttctggttctatgtctttgagaaatcaccacactgttttccacaatggttgaactaatttacactcccacaaacagtgtgtaagcatttctttttccccacaaccttgccagcatctatttttttgttttattttatttttcgagacggagtcttgctgttgcccaggctggagtgcagtggcgtgatctcggctcactgcgacctctgcctcccgggttcaagtgattttcctgcctcagcctcctgagtagctgggactacaggtgcacaccactacgcctggctaatttttgtatttttagtagacatgaagtttcaccatgttggccaggctggtctcaaactcctgacctcaggtgatccactcacctcagcttcccaaagtgctggaattacaggcgtgagccagagcacctggcccatcttttattttttgactttttgataatcggacgttatttttaatgcgattttttaaatttctttttcagatagttcgttgttggcgtatagatatgctactactttttacatgttaattttgtatcctgtaactctactgaacttctttattatttctaacagattttttatggcatctttaggattttctatatataagatcatgtcatgtacaaagaaagacagtttaacttcttcctttccaatttggatgcttttgtgtatctgttataggtttttgctttatggttatcatgaggccatcttgctgatatcactgtttttgtatattttggataagagacatttatcaggtacgtttttctgcaagtattttctcctagtctgtgactccatatcttttcattttcttgacagtgtcttttgcagaacagaaaatttaattttaatgaagcccagctaatcagattttttttgcctggctttgtggggaaagacctcacctttgtttctttcatgaaaagtgactttggtattgtataaaagtcatctagattttctcctatgttatcttctaggagttttatagttttgcattttacacttatgtctgtgatccattttgagttaatttttgtgaagggtataagatctgtgtctgacattaatttaggaaaattctcagtcattattgcttccaatatttcttctgctcctttctgtctttattcgttttctggtgttcccattatgtataattataccttttgtagttgtcccacagttttaagatattttgttctgtttgttttcagtcctttttttctctttgcttttcagtttttgcagtttctattgtaatattctcaagctaagagattctttcctcagctgtgtccagtttactaataagcctacctaaggtattctttctttctattacagtgtttttgatctttagcatttcttttgattatttcatagaatttccatctctctgcttccattacccacttgttcttgcatgctgtctactttatccattaaagttcttagcatgttaatcatagttgttttccattcccagtataactctaagatccctgacatatctgagtttggttttgatgcttgctctgcctctttacattgtgttttttttgtttttttttttttttttttttttgccttttagtatgccttgtaatttttcttggtagctggacatgatgtactgggtaaaaggcagtgctataaataggcctttagtactgtggtggtaagctacggggaggggaagccttctgtacttttctgattaggccatagtcttctagtgagcctgtgccctgggactgtgagcttctcaagtgtttcttgttttttttttttttggtctcccttatatgggacaggatggctagaacgtgccggagttgggtatttccctttctccctgtggggactagagccagttggagttgggtgtttcccttctcccacgtggaaggctagagttggctggagttggttatatcccttcccgcaggtcagttaggctctgataagaccctagcttgttaggctctggttaaatagtttctcttgagggcagaccttgttaagaagaacataatgctctagagtattttaaatgtttacttttttccttcccctgatggaaacataaggggatttttctccactcttgactgtgagaaactggtccagctcttggaggtaaaactcataaaagtttgggtccttctggagttctttactctcagacttgtctacactgagtctctagcaatttgtcacatacagttcaggatttctagtattggttcccatggtagaggtttctgcttataggtatctgctccaataggttgacatttctgtatctgcctgtctgactccccagttttgagggcagcactttgctctttcacctcacttctcttatggatctaagagtttgatttttcagtttgtccagctttgtatttgttgttagcttgaaagttgtcactccaacctccttacatcttctgcaataaggctacagaatgaagtaacacaaggctccttcctgctgggagtttcctgttgtgtaaagaacccaaagaagtaaaccatgattaccctgcagtacaatattgaccatggccagtgtgtggaaaaccagttgcctctgtcggtaccagagcctgattctgtaggttcaaatccttgttgtaccacttaatgtctttgtggtcttggtcatgtgatttaacctgtctaagccgtggtttcctcctctgtaaaatgaggatattcatagttccagtttccttgtggggattacatgagttatcaaatgtaatgtgcttagctcaatgcttcatgaatcatcactacttgaaaaaccgtgatggtgttgttgttgttatcagtatactcacggtgttagggagaaagagaagggtacacctaactctgaagttttatagaggaggtgatgtctgagaagtgttttgaagaatgagtaggagtttaccaggaaggtaaggaagagagtgttctgggcagaggaaatgttgctgtgattgtcatactcatggaaagcagactgacatgtttgggagctatagtctaatcggattcaacattgaatgaatatctcttctgtgccaggcatgcttctagatactcagatacagtgggggaaacaggcctggtgtctgctgacactgcacttagattttagtgaagagacagtcaatgaaccaagaagcataagatacttaaaattttaggtagtgatacatactgtttgcataaatttccctggaagcccattttaataaaatagggaggtggagagcttatcaagtaaaagaactccctaaacattctcttgtccaaagggaagggtgtgtgtggtagaggatagcagttgcagtgaaagagcagtgacgggtgatgaaatcagggaggaaggaaggcatctcccataggcatgaagaagctttcataggcaaagatgttgtcactcttaactgtaggtcagtgatccccaagcttctgtctttcatacatttttaccatatttgcagaaattaaaatcttcccattcaattatttatttaaagtttctatttaaattcaccttttagcatttagaaaataaatgcatgtattttcagaaggaagcattgtagtatagctgtaaatggaagaccaggcttacctgccatgaaagtagcaattggaaaaattaaaattaaaaatgtttatctgtgcactacccaaaaccatcttgagtggcacctttggtgcactccttgcatgcttggtcaatgatgaggtgctggggagtcacagaaaatgttcaatagagaagcaacgtgacttttgttagccaatggagtcagggtggagaggagttagcaagacatcagggatgctgtcgcaggtcgtgcccccaactaaggaagtgtcaggagacaaagcaagacagacagatacaaaacatgccttgaggtagaatgggatggggtggaggggatgatggagaggaacgaaccaaagaaaatatccagatttttggctttggtatgaagaagcaagtgttttcgtttctgtgtcatttgaactgtctaaggcaacattactggcacctgggctgatgaacaaactttggaagttaaagggtgttagacctagagccgtgggcttccattccaggagtgagccaaatatattcatcctgggatagggccctcccacttcctcttcctaaatgaattatttatattccaaagggccttaagacattggggagcaaagggttctctgtctctttctctctcaggatgggagaggtccataagctgtcatgtataagctcctagattcataattttggggttcttctcctgccatacagatcctgtccatgaagggtgacagctggttctcagtgggtccctgtaggacacggggcacgggaaatcagcacagttactgctgtgagtagtcagtttgagctctgctctaggaacccaagtttgcactcaggataaaaatgagtaactatagatattaaaaacttttcaggtagcaagtgacagacctcccaacctctatagatacagaacttcagaggtttaaaagcaatttcccgtgatgacctcatttgaccttctcgaaagttcagagccagctgggcagacatggggctcttttcagatggggaacttgaggctgagaggggaagggatttgctaaaggttaggctgcttgtacataacagagctggcttcttctaagtcagtggtcctccatggggctgattctgccctccagggcacatctggcaatgtctagggacatttttggttgtcacagctttggagaggatgtcataggcattcagggaatgaaggtcagggatgctgccgaacaccctgcagtgcatgggatggccccacaacaaatgtccactttgccaaggtcgagagacagttccagagacttcctgccccagtcttgtgcctttctgttacagggcagcagcctctcctttctgcaacatccacttggtcttgatgaaaaatgaaaccaacctgccaatcatgtcttaccgaagttacctgcggtgatgaatataataattttgaacttttctttagcatataaataatccctgcctttattataatattctgcaggataatgtctaactcagtcctaaccaagagcattatatttgtatgtgttttcttcaggaggctattataatgaaataaaaaggcagcaaagctcactgggaaaacagcaggctggggctgcccttgcgttggaaagtgcttaggggagggaaggttcattcttctctcaccagcctcccactgcccttcccaggggactctctgatgtggaaagccctagagttctccagcattcttccccggggcatcatggctctggccattcctgtgatcctgtccttccatgcacagctcttggcaggcctcttgacttagccacgtgatcccaactgggtgaaggtggatgtcctttggcccacacttgtggctgccaggatataggtttggtgcagagatttaatttttggagagctgagaactcgaaactggtggatggacatggcttcttggatggctggcttatcaagagcagctggccatttatgatttgttaagggcttttgctctctcctggcctcagcttctctctggatcttatcacaaacctgttatagtttcatttgatttgtttcttcgtttatttttttcctccctttttggttattgttattttcctggggttttgaggatcagactgagcagggtgagggagccaagttaccgcttggaaacctcagagacagcgagatcagatttcaggtctaaggtgaatttgctgtggcccagaatattcactctctttgtctagcagctcaattccctaattgccctaattgcagtgagcttctttttatctgcaggtcaacagggatacctcagtgatgcatttgacttcttaggaggtaagatcagccccccacccatcccttattctgaagaggaggatgttttccttgagttcaaaccctagagccacattctacatcataattccttctacaccataattcaactcaattcacaaaacagggatccagcttctgctttgaaagttcccatgcttaccattaaggacaaaaccacaatgggcaaatgtggaatcttggttctggattctccctgccctgggatgaagaaaggcatggcggttggctggagagcgctgagcctcccagttgaagagttagggccctgccagtgactatcccaccctcccctgtctgatccttgctgtcctctctggctctcatccctcttcaacatgtcttttccatcctgtgccaccatctgaacaccttggtcgaatgcatcaggctactgtctgaatctgggactctgcacacacagcatcttctgcccaagacatgttctcttctctggtcattgacgtgactcttactcatctgtcgggtgggtgtctgttagggactcagctgattgcgtgtcacagaagatccaaataggagaaacttcagcaagataggggttgacttttttctctcgcaaaaagaagtctgagggtagacagttgaggatggtgtgcagacacctggtccaagggctttgcaacattcctgacctttcccccgcctttctgtgttgcaagatgtccgctgcggctccaaccatcaagttttggactcaggcaggaagaagaggaaaggtagggggcaaacccgcaaggaccacaagcgtcttttaaggaggttaccttgaggtccatccacctggccgctgctgcttacctctcatctgccagaactgtggcacagctctgcagggagagctgggaaatgtagtttttcctttttcagctgagcacatagtcctttcttcctcccattactctaaatatggttctgcaaagtatattcagagaagtggagcttctcatgtcccattcatggcattttgtaaaatagatttttatgactttactaccttttaaaaaataaatggagcatattgtacatccttttctccatcttgcttgtctttgcctcacaatatatccagaagagttctcccaacatggttgtgttattttacatccccaccagcaatatgtgggaggtgtacttggcccacatcttagccagtatttactgctgtcattttttttttttttttttttttgagacagactctcgctctgtcgcccaggcaggcgtgcagtggcacaatcctggctcactacaacctctgcctcccgggttccagtgattctcccgcttcagcctcccgagtagttcggatgataggcgtgcgcccccatgcctggctaatttttgtattttttagtggagatggggtttcatcatgttggttaggctggtgtcgaactcatggcctcaagtgatccgcctgccttggcctcccaaagtgctgggattacaggcatgagcctccatgcccagccagtgctgtcaatttttaaaattgtattcactctagtgtctataaaattgtataacactgtggttttaatttttattttcctgtaacctaatgatgttgagcacattttgatgtactttttgaccattcatgtacttccttttgtgaaggttctgttcgagacatttacctatttttattgggctgtctttttattacaaattcataataatcccttaattgttcctgaatcagacaggtatagtatagacattttctatgagtctatgacttgcctattcattttcttactgatgtcttttgaaggattgatattttaaattatgattaaatgtatcagtttttctttaaaaaaatgtggtctgttaaagaaggagctgtattcatttcccagggcatccctaacaaatggccacaaactgggaggcttagaacaacggaaatggtttcctttgcagttctggaggctggaagtctgaaatcaaggtgtaggcagggctgtgctccctctgaaggctgtggggaagggtctgctccagacctgtctcccagctgctggaggctgccagcaacacctgctgctcctgtgcttacggctgtgccactccaatctctgcctccattggcacctgaccctctcccctgtgtgtcttgtatcttctcttctgataaggatgcaaatcatattagattagggcctcccctacttctatgtaaccttaactaattacatctgcaataaccctctttccaaataaggtcacattctgaggttccaggaagaacatgaattttggaggggcactatccaaccaaacatagatatcaaggcgaatggctaggaaattaactgtctctttataaggtttcagcttagcttgtgagcactgaaagcatcccctccttcacagcatagtagctaaatggtagttgcctgcttccttgtctgaattcctcgtgtgtcagagggcagggaactcttactttgttcctctccctgacccctgactttaagtaacagaaatccttaaattggctgaaattgtaagggaatttatcttcttggccaacaggaagtccataggtgggtcagctccaggcttcggagttagggccttagctttgctcatgccctccaggatgtgttagcttcaacttcggtcaggaagcaagatggcagcttccatttcagataagcatttgtagaggggatatttcccagacttccccagccatgtcaggctaggtcacatgtccttttgtcaaccagttgctggtaaggcctggcttggactaattacttaggggtcacctgacgttggggattcaatcaacaagaccctttccctgtatgaatgactatattcttgttgcactgttgagcctgggacactgctgtgcccatggtggcttcttgattgtgtggtgaccttgaaggctccaaaggccctgctcaaagccctagaggcattttgcaggatcatgcgaaccaatggaaacacgttttcctttggcttgggccagcatctcctcatgaccacagctccatgccagtactcctggaggtcagttgaggggacaacttgatgttctttcttggcaggaaccaactttctttcttggaaagttacatgttcctgagctggagcttcacaactgctctgaggtcagggttgtgggtgaacaggctccactgggctctgagtgagtgtggcttggcctggaattaagtcagggacagacatctgcccccattaactcaggattttggctttgactggttagccgaggaaggggtgtggaggactggagatgaccagtgatttttgcaagccaagaaactgcaggacaaggtcagtctttatttagacctatttctgcaggaataaagaaggtggtgatggtgtttctacttctaaaataagagcagagtgagtaaattctctttggggaacacttagccattgacctattacttccctacctgaaccttttcagccagctgaggggggtgagatgttgatcccaattgcatgtcaggggtgtctgcctttcccttgcttagaacagcccccttattcatctgggccctcctcgttttgtgatgaaagattcaaaaattaggaaaaaaaatgatgctggaaattatagctaaatgtacaaagcacttactatgtggtcaaggctatatgtgggatatctcatttactcttgacagaaaatactagcacgaagtagatagtcctataattccccattttacagttgctgtactcaaagatgagaaaggtaacgtcacctgctcagaaccctatagctgggacatggtggggtcaggatttgaactcaggtcttactgattctaaagtctgagctgttgcctcccaaaagccagctgccattcttttgtcacctctctaatttctccaaatagtgaattttcatgggaaaatgggaatagttcttcccactggcatcctttagttcaaccatagctaagtaataaaaatgtgcatttttctcataagacacaacaactcttaatgtattatgtgtaagagagaaaggtaggaaatgaccaaatgtccatcaatagtggacaagctgagtaaactatggtaaatccaaacagtagggtactatacagttgtaaaaaaaagtgatgaatatcttcatatatttatatggagtagcttccagtgtatatcgttaattgggaaaaaacctggtgtaggatagcattaatagtagtctccttttgtgtaacgaggggagaacatatatatattctattctctatgtaagaatatgttttattcttttaaatatatattagaatacattttaaatatatacttaatatataaatatatatttataaatatttaatatatttaaataaataatatttaaaacattaaatatattttaaatacattaatatattacaatatattttaaaatatgaatgtatataaagaatttttataaaagaatgaaaagataaaccaaaaaattacttaacatggatacctagatggggggaggaaattgggtgaaggaggcagacatgaaagagacatgtgagaaggtacctcattttatagaattggctttggagccctgtacatatttcacatagttaaacatgaaaattaaaaaatagcaacacttaaaaattgaaaacaaattgtaataagtgaatctaggtgaatgttaaaatggtgctcaattgcacacacaaaaaattatttcaaatgacttttaaacacagtatttgaactgtttatccctgggagaataatccttaagaccaagggaactgtaaaaaaaaatcttaactagtattcaaaagccttattttaagtaataatattggcattgctgttttgaaactattatatgataatgtaggttaaagtaagtggaaattatgttaataactttaggaaccaaattttcagtataaaagtaaatatatgtacatataaaatccaaagatgttcaataaagccctaaaatcttaaaatttaaataaaatgtatcagtataaattcatgagttacctttccctttctaaaacaacaacaacaaaagccccttacatatttctttttttttttttttttaacttgtcactgatgaagctcagacaatcctttacgtattttttaactctgtccatggaaaagtcctggaaatgactaacccagtagtgtttagcaatcacatgtccagattatggtctctaaatatcattttccacaaaatgaaccagagttccttagagaaatagccagttccaggtctggagcaggacctatgcaagttggacatgtgaatttttgttctgccagaaagcaagaaagctataaaagattaatggaatcatgtcaaaaggaagtaggagctaacaccatgggcttccactggcaaagaggggtcaacttgaacaataaaaaagaataatgattgcaattgtttgaagcaaatcaattattgccaaagtgataatgagaaaacaactctttggttgctcctgaacattgataaggcactaacttattctgaaaatttataagcaaagaaataagcttttatactgccttattgtgccaactgtattttgtggtaaaaaggtgatgagggaaagttctttgtaaaataaatgaaggaggccgggtgtggtggctcacagctgtaatcccagcactttgggaggctgaggtgagctgatcacttgagtccaggagttctagaccagtctgggcaatatggcaaaaccctgtctctacaaaaaatacaaaaaggagctgggtgtggtggcatgcacctgtagtcccagctactcaggaggctgacgtgggaggatcacctgaggccaggaggttgaggctgcagtgggctgtgattgcaccactgcacttcagcctggtttggagtgagaccagcctggctggagtgaaacagagtgagaccctgtttcaaaaaacaagaggaagaagaaggaatagtagaattatcactgtttgctatccctaatgaaataacacatctaggcaacaatcctggatgctgctgaaaccattagctacaaagccagtggagagaatggggagatctaagggggatgaaccaggctaacagcacttaaacccacttatcaatcttagcatcattagaagtgaggtattccaacattacgcacctcctgatgggatacaatagtaagtacgcagcaccgcgtatattcttaaagaaacttgaacttgaatctagcttgaatctctctagtgcttactaccagtcttcagaaatgtggggaataggagaacaagtgaaatggcactacaaggaagcaaccagctaaattcagaatgtgaaacttgctacaggagaaatgacctaaggtggggaaggagagtctctagattaaaaaaaaaaaatgtaagagacatattcaatcaactgcaatatgtgtaccatgtctgtatcttgatttgaggaaattaactgtaaaaagaaacttttgagacacttagaaaaatgtttcttttcctggatgttagaagatattcttgctaattttgttaggtgtgatagaagcattgtggttatgtaaaaagtatcttcaattgatagagatgtaatctaacagtaatgatggttaaaataatacactatctggttgaggctttcgggcttggatggctgggtggtgcagcctagtgtccacctgcagctgccttctgtgtcagtcctctgccccgccaaggctgtagagcttgtccatgcgggtagcaggatgctccaaggagctgcgcactggccacaccatggtccacctcactactcccctctgcaaggcctattacaggggccacttaacgatctgccttgccctgggtggctgcaccaaccagcccttctaccgcattgtggctgctcacaggtgtcccagggatggccgttttgtagagcagctgggctcctatgatccattgcccaacagtcatagagaaaaacttgctgtcctcaaactggactggatccatcattggattggctgtggggcccacctctctaagcctatggaaaagctagtgggtcttgctgggtttttccctgtgcatcctatgatgatcagaagtgccgtgagactatgaaggaaatgggcacctgaagtcctcttagcttctcagaaaacagatgcagaggctacagatacagaggctacaggaacacaagtgagctgacttcagtgagcatagcagtgagaacagggtcaaggtcctcttaaaatactgtgcagagatcttaattttgttagattcagaggtcaataaatggagtgtcctgagtcacccttgctcttctggcctggcccgcacagggcccagggagagatttgttcttgtgtgacacaaggcaggggctaggtattaattagatttttggactttgtcttgggaaagacagtggctacgggaggattggacttttgagttgggctctgggtctcttggacactttacaatctgctggggtttccaatatttactgcttcaaagcccccagccagactgttcatgttcatatcttccatatcttcatgttcatcccacaagcgcaagaacagttacctttcttattgattttgtaattggagatttatattgtcttgcttaacacatatgatcaaatatacaaaaggtagatttgttgtgaaaattgctttttggttgtaataacctaccttttaagaatgagaaagtgctgggcttaagggaattcagaatgaatcaagactgaaccattcaaatgtggctgcattttctgcatgtatcatagatgggatccttctgagaatactggaatagggaattatgacaccaagctaattcagctgtgaaccttattcttgtacttttctttcttgctggtaattttatggagcaggtagagaaagctgctgtatgttaggataaactgtataccaataattttgatgacctatggtgagtgatacattttacttcttgtatcttttccttcctcccttgatgccagtaatttataaggggtctgtatagttcgaatgtatttgaataacttcagtatactttagctctactttttgatttgactcaaagaaccatccattggtctcaagtattccatgtgttttaaaagcctgaagtcagtgagataaaattcaacatcaagaatttgaagtaaagtaacttgaaagaatgtaaagaaaacatacggacagtggcttatgcctttaatctcagcactttggaaggctgaggaagaaggattgctggaagccagagttcaagaccagcctgggcaaccagcaagaccccacttctacaaaatattttaaaaaattagctgagcatggtggtgcttgcctgtagttccaggtactcagggggctgaggcagtaagaacacttgagcccaggaggcctgggtgacagagtaagaccctgtctcaaaaaaaaaaaaaaaagaaaagaaaaaagaaaaaaaaagagaaaacattaggtagtattaggtatttggctagagcataataattaatttgatttcctggttttcaaaaatttgaattgcaataaaaggatatttcaatgtgctaaaaagtaataataatacactgtcttggatttgctataaaacaatccagaaaagagtgggtagataaatgaggtggcaaaatactaaaacaatcactgaagctgggtggtaggtacatggggatttgttctattgttttctcaactttggtatatgtgtgatcatttgcataataggtcttattattaaattttattttattattaagataaactaaaatagtgttttataattagacaatttgtggctcattttaataattccttgattgcaggttttgatgcacaaaaatgtttggtttactttgctctaagacttggcccagatctcaccacctccctgaaatgaagggccttccctgactgccctcctcagaaagaatctccttgctctgaagttccaggaagatcctggtccttgtgtcattctagtatgtatccagtatagcctggtaccatcagctggctttttgtgccctaaggtcaggactttgaaatccagcagtcctgggtttgacgcccgagtccgctgcttattgcttgtgtgacgttagagacattctttagccttggttgtttctctgcagatggacatgggatagtggttgttgtcaaggacaatgagtagtaggtgtcatctcttcctctaaaatgtcagggttggtgttgcaggttgcattgtgcctcataacttcatatgttcaagccctaacccccagtaccttagaatgtgcccttatttggaaatgagaccactgcacatgtgctaagttaagattatcctggagtagggtgggctgtgatccatatgactggtgtccatccatgtacggggggaaatttggacccagttaggtatacagggaaaatctcatgtgaacaggaaggcggctgtccataagccacggagtgaggcttggcatgaatcctcccctcacagtcctcagaaggaactgaccctgccaatgccctgattttggaggccttggtctggaggcctatgagatgatgcgtttctactgtttcagctgcccagtttgtggaactttgttatggcagacctagaaaactcacagagatggggtccctgtctttgtgttcccttcagcacctgctcagtgccttcttctcatcccaaagggaggccacagccgttgttcaggatgttgatgtcactgatgacaaggaagagcttcagaactgggctgtgagcccccattgctgcgctcctgtctggggttctcagcttggccactccttttttgtctgtcagtattactcatgcattagggtcagctccctctcgcccctcactccatgtgttcacgtacacacagacaccatgcatgcactcatacacaggtacacataccacacatgtactctcacacatgtacacacacaccatgcatgtactgtcatatatgtacacatatacacaccatgcatgtactctcacacacacatacagtctcaccatgcatgtactcacacatgtacacagtctttatgcatgtactctcacatacacatacacaccatacatgtactctcacacacatacacagtctcaccacatatgtactttcgtacacatgtaaacatacacaacatatatgtactctcacacacatgcacacagactcaccaaacatgtactcttacacacacgtacacatacacaccatacatgtactcatagcctcaccacacgtatactgtcacacacatgtaaacacacaccatgcgtgtactcatgtacatctgcagaccatacatgtactctcacacatacacatcatacatgcatgtgcacacacaggtacaatgcatgccatgcatgtactcacatacatgtacacacatgcataccatacatgtactcatgtacacacatacatatgtacacacatacacatgattttgtttctactgctctagagcaacaatcttgaactatttgctagaatgctcctgacctagtaaaatctcaggaaaggccgacaagtccttacaagttatagagaaatgatgtattaacctattggcctaaacaaaattctgtgagcccagttgtacaaatgtctggaaggttaggtctgtgtgagttaattctgagaaaaaaatgaattcctggattgtagaaattgatgttacagagcttggggctggttgggagtggaagtcccaggaatgtcatctccgggggctccagatggttccatttctccaagggccctgaccctgtgtcattgctgtgttcagccaccaaggggtgactttgacttggcagagttctttgtggtggctttggcagcagtggttctaacaaattcagcctgatggtttgagggagctccagttcctgggtccattctaacttcctaactttgcaaattcctggagtggcctaactaactaaaggaaccactcctaactacaaatgagacctcaagaacaggaaggggtgcagaaacccagctccagggtaatggtgagcaggtcagcacaggggtcttcaatgcctgtgtacgtggtttttggccagtggccacaatctcatccctgaaagttttgggagaccagtttatgttaccttgaagaactagggatttcttgtaactatggaaacataaatctcgggattaaagagtcagagagaaaactgctattgttgccttgacaacccataaaaccccaagtctttgtggttaggagtagagataatgtaccttcaatcttttaagctaatttacttgtgggaagaagtggaagtgggcttgggcaccctgtggaagcagatgctgccctgactgggtgtgtgtgtgtgggtcttcccaggcccaccctgccgagtggcaggtttcaaattctgcctaataaatggccaagatgtcctggagagtctgtaccaaaggactggctctcatgttccaaggaggcccttgtttcttgactctgtgggtctgtaaatggaatgacttccattcctgtattgcagaagttatgttttgagctgtttttggaggggatgtggctacctgaagggagccgaaatcttttgttactgggacagatactcaaaagctctttccctctccaagttcctgcccctcactttttgtaagaaaggctgggaatttaaggtgtgcagcttcagatgaaactaagggttctgaatgcatggcacagcttctgcacctgaggcactgtcacccttgaacctgctgataaatgcccataagcactcagagctcggggccacatttaggtttcatttctatgttccatcaagagattattttttcttccttaatatcctcagcggatattgtgcctcaacgtggcacaaaaatttctgagttgatgtccagatgaaatttgcatggagagtgtcctcatggcaactctggggaaccagcgagaggcttcctgttccaactagagaacaatgacatcgcgtcttcttgaggctgaattgccaactctctttgttggggaagatagcagtgatagatgaaaggaaaattggaggaaaggctttttcaaaatcattacattgccaagtgtgggattttggatccctattcagtggagagaacattgagtaaaatgagaaaacagcacacacagaaatgcctgtgatgtggctgatgagaggagcaggtggagcagttcctacccaccctaccactatcctggccctgtctccacaagaggtacctttcaatagttatccaaatgtattacattcggatgacgtgttcagacacctgaagaagttaaccaaatggccactcctctttgatgtgctgagggttggtcttctagcccgaccctagctttctccccatgatctgagaaaatggcttccccctctcagggatacttcaggaaagctcagtgtggagaattcgggattacacaaatttatcaatccaaggactcgtcattaaaacactgaaggaggcttttaggggagatttcactgattcagcagttattggctgcaacctgctctgttggaaacacagtgttggggatgtggccagggacaacgccggtccccatcctgggggagcttcagcttggaaagtaaatatcttgactgtgctacaaccgtgatttaattcccaaatgtggacatttcacgaatgtgttataagatgtgaagtgtacctttatcacagaacaaacaagaagaagccaacgaagcccgtggggctacagagctttaaactagattaaaagcaattatttactgaaatagccaataacacactccctgacctacaaggtgtccgagcctccttttcttttatcggttcaatttcttcatattaaatgtggacaaacacggagcattgtcatggaaaatcagcacactggtgaattagaaaatgatctgaaagcactaaaagtgcaggcgatgaatccattttgacatgttgctttcctgttgactttccagccattgaatttgctgctgatctgaagtatatttcataaaaagctgcttcactaataatgatcagacaaggatttctcttattaagtcttggataacaagggaagctgtgtacgggttattctgggtgatttctaactgctgtttttcacacatgaatgagattacatacataaattaatcatcactgcccctgatgcattttgcaagttaccttaaaaactcattttaaaaaagcatgcagaaagtctcatccatcatccccatctgttgctttttccctccatggcctggcatggcttcacactgtgatattctttttttgcttctgtttaaaacaaccacctttaaaaaataagttttcaaactagggattagggaattgattacgtggtgacatggtgctccttacatttcaagaagtgggaggaaagcgggaattttaaagcggatgaatcaccgggggattagagggagccacagcacctagagatgtaagcgttcgtagtggattgcatggcttgttctgaaacacttatgcttctgctctttgaaggccaaatggtggagaataacttacttagctgatgcacggagagcaaaaagagggatgatgggtgacagggtgcagatcggtaaaggagcagacgggtcctcctctgacaagtgggtcaaccttctccttgcttctgagggaaatgctagggaggagatacctcaggctctggctcagtccttcctgggtcttttcctgctggagccaagtgcatatagaatggttttcaagttcccaagtggaaatgtcatgttgtccaagaagctgttatgcacaagacatttctttttcacagtcatccattccctagtttgttttccaagagcccagtagatactggataaaattgtagatgctggggtctctgtgagggaccaagacatcctatgaatgaagtggtatttggaacaatattgctgctgatcagagggtccaagggagatgtaggtgccgacgtcactgagatcctgatctggccacgtttgaacgaactatttaagcccgacctcacttcctcaagttcctaaattcctcttgacaacaaacaagccagtctgggttgagtttctgtcactaccaaaaagatcttggctaacaggaagtgaactttggttaagtgagagcagctcctggcatgtggttaggacacatttgagggtcattgtggtttttactgtcactgtggtaattccccaggggcggtgaccctccacctttcaccattccggagcacagcctccttcaccagcctcaggaaagaagcaggctcctgcagcaaagtggaaagctgctcctgctttcctggtctaggatcaggacagctgaaagttccaggttttgtttttagaaatagttttgatcaaatcctgaaattttccaggagttcacagttggaagaggtttcacctgataagaaatcactccattcctcatgctaaagaagtgactgctgatgcactgtggatttttgcttctcggcgagtggtggctgggggaggactacagagtcatctgttgtttttggatgtctagcactcagtgtccctttttctggtgacagcatctctcttttcccctggggacccatggtattctcaatctgtgaggttcaggtggactgaccaacatgcatagacggaagctgtgctacagctcacacctgcgtcatcccgaggaggaagagcactttccagagggagcagggagaggtttgagaattctgagggttccatgtcatctctgctaagattgcttattggctgttgaggctccattcacatgtatgtagtgcctgaatatttccacaacaaatgtggaaggatgatgtgatagattgtttgtaaaaatggccacgattctccatccctcctctctcattctctttgcaatgtgacctttctgccatcctccccacccccatcaagaagtgaggtccacttctttaccccttgaatctagcctggcttggggcttgctttggccaatggaatatggtggaagagatgctgagcttgtcccaagcccaggcctcaagcgcccttgtggcttctgtctgctcacactctccctcccttgtccctgcctcagcagcctactgcctctgtgtggaaaagcctggtatagcttagtgaagaatggggaccatgtggaggagagcccgattgtcctggatgagtccctcctgatccagcctacagccagatgccccccaaacacgtgatggagctcagtcaggtgagcatgagcaagcccagctgagaccagaagaaccacccagctgacctctacagcaatgataaatacttttcagattaagccactaacttctggggttatttgttacacagcaaaagctaactgttacagacgtcatcagttaggcttattaggtactaaattggtagctgtggtaaaaaattgtctaaacataatttaactccacacatcccaggaagctttggaaggtcactgactttgaaagcgcaaggtattcttgttgccatggatacccccattgagacattagagtgcaaagagagaaacctagtgttgccttgacaacaggtttgcaaatccgagtctggtaaagcaaaagactacaaagaacaggaagaatcaggaggagggggaaattagcctaaagaagcttcccttctcccagcaaaacaacaacttgcctccatgcagtttgagagtctgttagaagaagcactgcctgaatggggagctataaagtgaacaacaggaagcccttctcttttcatggcccatctccacagcaggagaaaagtctcacagccagggagcagcatgcggcactgtcactaagtgcctccttcaagagttcacaatttgctctcagccaagcttcattccaagaatgagagtttgctcaagctggaaggggtctgaacagcatcgagtcccttactcatcctctccatcagctgggagggaagctgaggtcctgagagggaagagggctgctcgcagtcagtctaatgtgccattaggattttagtctagtctagtgggtaagcattcagggcccggagtcagacagacctgagtacaagtcctagtgacaccatttactagctgtgtgacattctgcaaaccagctgacctcgtaaactctttctgtaagatgaggatctcactaatgtcagcctcagagggtggtgagaactcagtgaactaatgcatgagaagcacttacacagtgtctaacctgcaatgagcttgcaataaattgcgtgttattctttctactatgatcatgtcactctgcctctactcttcagactcattgaagtagtaccaaggaggctcaactggatccagaatctccctcgggaggcttggtggtccattttcagatgccctgtgtcattttctgtatcatacaattggatgtcacagtttctaattttcaaagccattgcattttctatttcctcttccctacagcttggctgggcaggcaggtggggcaacactagcttcatttttttttttttcactttgtcagggaggaaattgaaccccggggaggtttgacgatctgcccaaagtccctgggaagtttccggccgttctagggctaaagctcagctctctcgactgcatctccttcccacccccatgtggctacccccatagaatggcgcatccacgtagatggcccagatgttgggtttaagggagagagagaaaggaagtttggggcatctgtttatgagagaaaatcgtcagccgtgcgtggaaatcttatgcatagcaaataaatgatgggcaaatacccacttgcatattcagaggcacatttcagatgtgaacatcctgtctcaccaaaacaaccccagctaagaagttccgtcgggggtggaggactttttccaagcctttgtttctgtggagtctctgtgcatggcctgctgtgatgaggtaggggttgacccagaagtctaaggaggccaccaccccgtaggaaagaggagccagcagacagcagcgccgggggttattggggacccccaaatggggaaaggtaggggtgtagacaaaatcagcagccctgtctgtatttgacaagcagggcaaggaggaagaaagctcaaggagagcgatgtggaggtgactcgatgacagggtcagtgcaggtgaggggagtgggctacccattaattcccaggagcatggtggtcttcccagcccagccacacagctgctaagggatcttgctttctgaggagtgtctctaatcggggcatttgatttacagcagcatttctgggctccaatcaggcatctcatccacagaacataaaccagattaagaagctctctgaagcatatttgaagtcagtgacagttgaaaggatattaaagttttgacttcaaactagcttagccagggcacacggagcaggcaatacaggtcttcctcctgccaggagaacctttaccattccccgtgaaggtcaggattgttggttcaggtgcggggacaaggtggggtggactcctacgcaaaataatctgtgttggtggcaatgtcaggtgatcctccagcagctcaggaaaaataaactcttcctatggccgtttcttttccctcggttctgaacgggaggaggacactgggatgcctgtttgtgttctatgactctagcctctagggtcattcctcaggccccattgccaaagaaaaatcatggctgtgttggtggtctcatctggcctcatattaccataggctggctggaagcacagctgggtacagagtctgattttgaacaaaactgtcacctcttttgtcccttggcaacatccctcagtgccacataaggtttgtttttgtgtacctgattcaccatctgtctcagggttagcaatccaagttctgaaatcatctgggcttcacaagcatgattagctgttgatctggcttctgttgactctaaaccccgggttgggggattacagatgtacctaagcagcctgtgcagtggggccagacgcctccgtgggtacagcatgtccaggatcgttgctgtctgttgctgggctcaccaccccagcaaggaggaggtcacgcaagggaacacagagcttgtagtcagaaaacaggggtgcttgtcaggtcacctctctgaacctcagatctctctcgtgtaaggggctggccccttcgagaggctcagtgtggaataaaatggctcttatcgcagtgggcttggcagcccgccactcctcatctttgctggtggaacctctagttggtttcggtgtccaccctcctccacgctgggagtgtgttcaggatgaggatcccatccccgtgcacggggtcaagtctgattggaggcgatcatttctggctgtcacattccttagaccagggctcagtctagagcgagcaagtattttaggcctggccagtgaggcaaagataatgcctgctggggccttctgaaaaaaatttccttaaaaagaggctcaaagaagagagatgtctcttttctttggctggacgttattaggactagatgtgatgcctgtgactacgtgaaccatcttgtgaatgtgacagcctggggacagagcttgcacactggggatgcaagatcagggagatattaatagaaaggacgtgggtcactgctaggagctgtggctcttgcgcactcgccatccctggcctcaccctgctgtagaacttcttgatacgtgaaataatacaaagtccttattgtttcaacaattcagaagtgctggcttctgtgacttgcagatcagttcaccctaaatgccctgctcctccaagtggccccagcatcatcagcatggggagcttgtgggaaatgcagactctgaggctctccccacccccccgcagcatcaccctctgttccttagtgagatccccaggcacttcgtgtgcatactgacgtctgagaagctccgccgatgggtttactttttgtccaacgtgttctgtggaggaggacttgggttttgacaatactgggttcaattttttctcgagacagagtaggaggtgttagctatgcagattttgaaatctcagctgtgtcaaggaattggggaaaagctcagggaggaaggtggagggcctagctggtctctaaaataaaattatgagagagttgtttattagtttctgctttacccaaccatttttcattgactcgtgtttgggtaccacatcgattttaatctaaagccgtgactacagtaaaatctcattaattcaggcctcaccaattttgaagtgataatttaaatggaggctgggctggctggcgtgagagcaggattgagagcaaactgttctgaaggacttgggcccaccaggtgggtgcaacgagatgcttccaattataaacgacccttggtgtgtttgagttcagcaggagccacacttggaaatcaatccatcaacaaagagttattgagtgtcccttatgcaaacgtccccggctggcagaacacacttggttagaagttacttttaatcattacccatgctggaagtatcagatttctttaggaaatgccatttcttaagcagcctgtgttcctatcctaggccaccttccccacgtgtgccagagcactttgctcttgaacagccccctctctctcccccgtgtcaattcctctttaccctccaaggtgtttataacttgctgtaggaactcttggattgtaaaataacatgaagtccctattgtttcagccattcagaagtgctggcttctgtgacttgcagattagtgcaccctaaatgccctgctcctccaagtggtcccagcagtgtcactgtggggagcttgtgggaaatgcagactctgaggctctgttccttaacaagatacccaggtactgggtgtgcacactgaagtttgtttctatccttttagaaagagctctctgatcttgattctatactctcctccagccacaccctattttcctgcttccctttgtctcctctaagagttgcctgctcccgtctccagctgtcctccattttcattcaaacacactgaaattcagcttccatggcgccccgtttccatatgcatgcatggcctgaggccacgcactcatagtctctcctctccgcttgctgtccgcatcagccaccttgcacatgcttggtcactctccttttctggaaagactttcttgcttgtcctctaggacaaactcttgattctctgtgaagctcatgggtcactctggctccgtcgtctttgtggcttctcctcttctgagctctgggtgttgggctgcaggacccgttcctccctctctcctgggtaagtggtggagagtgtggctttgagcgcctgttggaatgccgatgggctccatgtttatatttctgcctgggttgctgccccacccaactggtcccctcactgccccactgcccctacctacctcatgacttctcgtctgaaggggttcatcccaggaggtttgcttcttgggtaaatttcaactccattcttccttgggccccgggcaaaactctcggaggatcctttctctgtctcacaccttacatctaatccaccagcaagtccccttgggcctgcctttgaagcatagtctgaatctggccatttgtcgcacctccatcactgtctcttgagtccacgtcaccattccatttcccctgatcatagaccatccacttctcatggctccccggccctgtcatctcaccctagaggcttttctttgccaggtaatccgtgggatcctgtgaaaacctcagtcaggtcatgctgctctctggtcagatcttcctatggcctccctctcacttggggtaaagtcccacgtccttcccgtggcctcgagggcctgcaccttcctgttcccagccagccccacggggctccctgctcttcctccattgccacaaatgcgtgtttcagcccagatggttgacacgtgctttcctcgatttccatgactggtttccctccgacgggctcactcctactttatttgatctctactcaaaggtctcctactttattttccagcgtgatggttttgccaccttgcctgtgagatatttatgtgtttcctgcctgtgactccttctggaatggaggagcttcaagggcagggcctgggttgttttggttcctgtagcaccctccacccccaggaagcatttctcaaatgagcaagtatgcctgcccgtggaacttttctgaatttgggctgaacttttctggcctagacaaaagaggaggactttggagaggatgcagagtggagccttccattcttccctggtgagctctcagggcagtgcccatatggtgtgccaagcctaggagacactccttcgctgtagccagcctggcactggctggatgctgggctgcctatcctgggggccgtggcccagtgtgaggcgtttgcaaccgtgcgtgtgcagcacatgtgcgtgcccacacatgtggggtgtggtctgcatccagaagcagacatttatgtaaattttcatttatgtaagcacataaatgaaaagatgatcacagattgtgacaaatgccacaaagaaaataaatagggtaatgcaatagtcacagtgaggagggatactaattaggtgttttttaaaaaatcaggtataattacatatggtaaaatgtacagaccaggtgtttactttgatgagcagtggccagcgtgcatactcctgtccctgcaagggtatggaacacttcctcttccatctgtcttccctgctgtccctccccagtcattcctagaagggacccctagatgactggccagggaaggcctctctgaagaggtagcatctgaattgagccctgaaggaataggaggaggtggccacaggagacctgggggacagtgcccagatggaggatggtccaggaggcagcatggcagagaggagtggctgagacagagccgcagtgtgagctggctggtgggcagaccacgttggcccttgccagctagggggatgcacctggcctttattctccatgagatggtagccacttgttggggggctggggatggcagaggcagtgtgaccaggtcagaggtggtggtggctcaggccggggaagtggtaagaaatggatgtactttaaaacactttttattttgaaattatttatttatttatttgagatggagtctcgctctgtcccccaggctggagtgcagtggtgcaatcttggctcactgcaacctccacctcccgggttcaagctattctcctgcctcagcctcctgagtagctggtattataggcgcccgccaccacacctggctaatttttgtatttttggtagagacggggtttcacccgttgttggccaggctagtctcgaactcctgacctcaggtgatccgccagccttggcctcccaaagtgctgggattataggcatgagccaccgtgcctggcctattttgaaataattttagactcacaggaagttacaaacgtggtgcagagttttcccgtggttcctacacctctcttctactgatagcaccttatggaagcacagtgccttattcagctgtcatcagtttttgcatgcatttgtgtgtgtgtatgttgtgtatgtatgtgtgtgcatgtgcatgtgtgtatgtgtgtgttgtgtgtgtgtatctagttctgtgccgttttatcacctgtgtagatgcatggaacccccaacgctaacaagacacagaactgggcctggtgtggtggctcacgcctataatcccagcactttgggaggctgaggcgggtggatcacctgaggtcaggagtttgagaccagcctggccaacatgatgaaaccctctactaaaaatataaaaattagcagaatgtggtggcgggcgcctgtaatcctagctactcaggaggctgaggcaggagaattgcttgaatccgggaggcagaagttgcagtgagccgagatcacgccactgcactccagcctgggtgacagagtgagtctctggctcaaacagacaaacaaacaaacaacacagaactgtgtagccccgtgaagttgctgcctgtgtggccccttcatggtcgtagcccacctccctaacctctggccagcactcattggttctccacctctgtaatttcgtcatttggagaatgctatacattgactcacacggtgtgcaggattggcctttttcatttcactcagcacaaagtccctgagattcctgtatgttattggtgcatcccatgctcgttcctccttctggctgagtagaactccatggggggcttacctatccacctgttgaaggacatttataccatttatcctattaactagactcagaccatatgcagacttcaggattcctgatggacgttggaccagagccagcagcccttgggttgggtgtggttagagcagaaatgaaccacctggccttggtttcctcatttgtaagatgggcataagaacagtacttcccacacagccttgacgatgggattcagggagctaggaagggcctggcacttggtaagaagctgaccaacatttgctgttattaaagagacagggccattaatatgcttggaggagagaaggttctcttgggtgggtgtcgtgagaggcatagcatttaagccgggcctggaagcacattactggcttcagcatcgtgttccttttctccctgtgtttttccagcaagatgtgaactgtcgtagccattggaaggtgtgagggtttgcaaagtgtgaaagggcccctaagtttccagggtgcactgaactgctggcatccggcctggcactctgagcaaacagacacctgatggttctctcttcaccctacacattgctggggcgaggcccagaaaaagaagtttgaggcgtttggcttccctcccctcctaatgagcaagacaggctgtgtgaacatgtcctgtggatgtgggtgcaccttggggcttctaaacgccaaaggcactttggaaaggcaaggtgctctgtctggtggcgcttgatggtgatgttggaagctgctggtaatgtgattaatccaaatttgagtcccagagatgaaaaatgccccaaactcaccctgggtatggacacatctgtgcctttggtgtttaatggatattctgaatggttcttgggtgggaggtctgggagttggggacagttttctagcctctgctttcaggactcaggaacctagtgtctgggtggggcgcttggccctgacactttctgccagtgggactttgacaatggctgagctctgtgagcccctgtttcctcatctgaaaggagggctagtaatcctcttatcacagctggttgtgaggcctgagtaaatgggcgtggaagcatgtggtgcatggtaggtgctcagtaaacatgagatgtgtctcgctcagtaaacatgagatgtgtctgaatccatctccctttgaaacactcttttgtgggcaaggttgaaggaaatgctagactcccagcattaaccttccagcatccatcttgggtcttgggaccacttcttggtctggagttggaaaaggcgtcctctctgccccttcctttcatatgtttgaaaacagctttgtggtcatcagtacccaagtcaccatttctgtacttcacgttcatctccagctcacattctgatgtcctcggaggacaggaaccacactcctaataaaggattcctactaatagtcagctcccgcactaaagccagggtcctggtccaggtgtgatagccttcatgtgtgtcagctcagggggtccttgggagagcttctcatggtgggtgtcatcacctctgacttgacagaggggaggtggaattccttacttactgatacatgccagtgtgtctggctccagaagtcttggcctcgaggggtttcttgctgcctactctgccctgcaccccatggtggtcctttcccgtttgtcttccactctacagaccccagccccgtgcaggtgtccctctgagcaccgggatccttaaggagtggcctgggctagagcaaggaggcctgctccttggcacatttttaagggagtaagggattgagtgggtgatgggtacagccccagggaggtgtgaagcagcacctgcaggcatggcagggaccgccttgtgagcccttgtctccagggcgtgagacagatttatctctatccatccaggcatggccaggtctttagagtgctggcattctttgtgcctcattaaattgctcttttcttcttaaaatgaaaactgttttcattgtactttttttcattataaaaatggtacatgatcactgtaaagaattcaaagcacacaggaaagcataaagataaaaattaaaatccctccagttctctccacataggggtaacattctggatgcctcttctttggtgtctcactgtgcacagcacacatacaccccattgtatgagaaatttcacacaagtgggaacattgtcctgtgctgttctgtaacttgctgttttttttctgcacaataatatgatagagtcatctttgtgagttaaaaaataaaaactgtagcattctatcagcattttaaatgactgccttgcatttcagcgatgtcccataatttagttgctcaagtttcttcttgttggaggtttaactctttttttttttttttttggccattgtctgacttcagtaaactgtcttgtatatgcctatagtgaatgtgtttgattatgttgtcaggaaaaattttctagacgattaatcgctgtgcccatattgccaagctggtctccagaaagtttactatttcacatgcccatcaacagggctggaggaggcctcttccctgcagccttgccaagcccagctttggcaatatctcaccttcttctcagtctggtggataaaaaatgacatctcatcttcacctgcttttcttttgatgatcagagaggtgaagtatctcttcataggctccttggacattggcatggcttctggaaatgtctttgcctatttttttttcaattgggcaccttgtctttttcatacttttttgtaatcaccagattgctacactggtgaattaacttgaatcctcagcaaactttcaacttcatctcaagcacccctcagctggaagaaggtgagctggtcagggctgaaggccgcttctccagccttgctggcccgggtgagctgtgccaagagccagctgggctgaggctccactctgctgaggctcccaaggcctgacagtggcccattacactgctgaccacagctggaagcttctcaactgacctgttagggtatgttcaacctctggtcctgcatgacgtccgtaggatcactttgggcagttgctatgctccggtcctgcatgacgtccgtaggatcactttgggcagttgctatgctccggtcctgcatgacgtccgtaggatcactttgggcagttgctatgctctggtcctgcatgacgtccgtaggatcactttgggcagttgctatgctccggtcctgcatgacgtccgtaggatcactttgggcagttgctatgctccggtcctgcatgacgtccgtaggatcactttgggcagttgctatgctccggtcctgcatgacgtccataggatcactttgggcagttgctatgctctggtcctgcatgacgtccgtaggatcactttgggcagttgctatgctctggtcctgcatgacgtccataggatcactttgggcagttgctatgcttgtttttccagtaggaaaacacacctcccccgtcaagttcttatccaaactcaatttttgtgataatttaaagcaatgtatatgaatgcaggtctgtccataggcatctccatgcagaaccagatggccctgcccatgggcagaacaagtggccccgtgtgtgcctcaatttgacagttgccaaggaggaaaagggaatagaaagcatggattttgggttatgggtgtagggctggggacacaacaagcagcagataaaggctggttgaccaagtgaggaagaagcacatgctggagtccaggggtcagagactcaagagctcatctccctgcattctgtcattttccagcttggaaacagacactcagagaagggaggcagctcagcggcaaggacgagccctggagcaagagtgcatgcctccccctggctctctgctcctttaggccctacttgacttccatgctgctcactctcaggtcccagagaagagcgcatcattgccatcaagtgcaggtcactggtcagcagtgccgtgggataagacgatgataagcacatgccttctgggcttggcccatggtggggctgctgctctttggggccctgatatgggaacacctcacagctcagatgctcctccttggttcccagcagatgtcttgggcatgtttctgggtcagcttcctgctggcttctcagtggcattgaggaccaccccagaaccctctaatgtggactatcatgcccagaatcttgctgaatggtggacagaaagcagtggctgtagcagccagcagatcccctgctcccctcctgctctccctccctaccaaagaggactcgaagtagcagaacccaggcccaaagcagtccctctatccacggtgatcttgtgtccttgttcggttattttcttgtctcttgtctgtatttccttatggggactgtgccatcctgctcatcactgtcacccagcaccaaggacagtgcctgacatgtagaacgtcattgattgctgaataaatgaggaacaaggagactgaagggaaaacagctgcatgggtctttctttatccgcttttctctcttgacctttaagcagatggaaactgtgggctttctctttagtctactctgagaagctacaggtgagatactggacctctcagagacctgagaaggacaagagaaacccagcggtcccaccatgggccaagccagaaggcatgtgtttattgtcgtcttggctcaagacactgttctcacatgcttggctccccatagactggctgcgtggtccttctgttcccaacctctctgtgctcatctgggatgggagcgtctgtagtcttcctcacagagccctggagccacatgggttggggtggaatctcaactttgcttcttactaaccgtacaatcttggggaagtcattcgatctctttgtgcctcaggttcctcttataaatgagactaatgaaagcacctggcttagagggttgtggtgaggattgaggaataccatgcatgacaggtatccacctccactggccccttcccctccaagatggaaaaaaaaccatctgcatggcagcaggaacattgattactggttcctctacaccagctaccccagcagtcctctttcagcctctcggtagctctaaggaataacgactattattattcttgttgacccataaggaaaataagccacagagaagggactcacacaagatcactgggctcatgttctactgttgctgtagaaaattactacaaatttagcagcttgaagcaacacccatttattatctcacaatctgtttgtcagaggtccaggaatagcatgtctcagctggttccctgctctgagtcttacaaaggtaaaatcaagaagttggcagagctgggtgtggcaactcatgcctggaatcccagcactttggaggcgagattgggaggatcacttgagcccagcagtttgagatcagccttggcaacatagtaagcctccatctctacacaaaataataaaaaaaaaatccaggcagctgggcgcagtggctcacgcctgtaatcccagcactttgggaggccgaggcgggcagatcatgaggtcaagagatcgagaccatcctggctaacgtgatgaaaccctgtctctactaaaaatacaaaaaattagccaggcgtggtggcgggtgcctgtagtcccagctactcaggaggctgaggcaggagaatggtgtgaacccggggggcggagctggcagtgagccgagactgtgccactgcactccagcctgggtgacagagcgagactccatctcaaaaaaaaataataataataatccaggcatgatggtgcatgcctgtgatcccagttattaggttggtgcaaaagtaattgcggtttttgccatgactttcagtggccacagttacttttgcaccaacccaatacttgggaggctgaggtgggaggattgcttgaacccaggaatttgaggctgcagtgatccatgatggcaccactgcacttcagcttgggcaacggagcaagaccctgtctcaaaaaaagtcagtaggctgtgttccttactggaagccctggggaagaatccacttccaagcttattcagcttgtcatcagaattgaattccacgtggttgggggactgaggtccctgttttcttactaactgtggactgaatacattgtcaaggtctagaggctgcctcattccttggctcatggcccccttcaaggccagcataggctgtcaagtccttctcatgcttcgagtctctcttccttcccctcctgcctcatctcctaccctctgctgctgcttcattgccctgcctttctcttctgcttttaagggttcatgtgattacttcagccccaactttataattgagagtatttttcctatcttaaagtgagctaatttgtaaccttaattccatctgcaaagtccttttgcagcggtacctagattaaagtttgattgaataaccaggggatgtggttagaattctgccttccacattacccagaaagtaaatggtgggacaggacaccagctctgtcctgagatcctggagctcaagataccctctgacacccaactgttgctgcacctgcatgttcatgtttaaacctgccatgatcctttgcggtagatactgtagctccctcttgattgcagtccaaaacctcccccctcctctgagctttcatcctgatatttggctcattctaggataaaatgttggaatttggccatattcttttcttcctcaccagactccagatttctgtaaggcaacatagcagaggctacaagttgtcccccaaaatcttttttcctttctatctcatagcaacagatcccccaggttttatctgggcacgtggttacccggaatagaaataaaactttctaccttctcttgcagctagggatggcctgatgactaaattctggtgaaagagctgtgatcaggaaagagttatgcagttttcatgtcccaaccttaaagggaaggggtgcatccaccttccacccctttgttcctcctggaataagctggtgaagcaccttggactatgtgggcaagggcatttgttagggagaaagagcaaccagttagaaggagcctgggtctttgactttgtggatccatcacccacctctggactgtctgtgttgtgattattatacagaagaaaaataaacattcatcttgcttaagccactgttatttggggtctctattacaaaacccaaactttcatcccaagacaggcaaaatccagattttttagaagttatatgcactaatatgcctttaatatgcttccaatacatcttttttttttttttgtgatcaatgaagcgctgtatacaagatgaaaaataccttgcctttctcactacattttgtgtaatcagtctctatttctgttcaccaatgatgtcaggttggagaacagggagtgccaagatgttacttgacatctctgggtcctcagaggtggtcaacttcaaactcagacctttttaggttctcttggtggctcaaactttatggggttatcaaagctggagtctgcatcagctctctgcccctggaagagtttcctttaattccgtagaagttgagctgacacagggttagggattcttgtgtggaatggaagttgcaaagccagagtcaacctgcagtttttaacctttggtttatggcagtatcatgaacatggccacatcctggcagaagctccaggcaggtgggagtggtgccagcagagcatttatagcaaccagcactgggtggagggacctggcagtgcccatgtgttccctggggcacagctgtgttattctaagataggcctactctgaccctgtgtcacatcctaagcccttcatttcaattcctgtgtcatttctgcacccaccccccaattccaagactgtggccccttcctcacttgctatcccagagaaaattgctaagttcctttggacttcatgcattggttacctgctttcagaaatgcattatttcccaaatcccaaacaccaggtgttaaatgtgtatgaattacttgacatatttaattgcaggattaatgctgagacacagtaatgtatttagggacacattagatgtattattttaaaactgtgattaacaccgattttggagcattttggaagactaattaaatgattgaaaaccacattctggcattgcaatgtttgttcaacaaaaacatttgtggaaattaggtgtaattcaaccacctcattatacaattagttgtttaattctgtctgcaggcgtttgaggtcataatcaggatgaagctgtggcttctggggcatgactgggctttaggatgggtctccccgctttccatggtgctgacaggctcctcactttcagggtgctgagtggctccccatgttttatggtgctgtcttcccctgccactagtctcttctgccatccttcagtctcgctggcccccgtcccctgatcactgtgcttgtttgcacctcactgcactcttgcttgctctctgctctgcctgtgaggtcattgttactgttgttcaacaaatatttttggtttttctcacaagcacataatagattatgctccattcccacaccccctcaaagttaggtctccctagtaactaaggcgatgtgggcagagggacacgtgccatttctgggcaaaagcttttagaaccctgtggaagttacaccttttcttttcctttgccatggcaactggagattgtccagacagcagcttctccatcaatctggggtcttgaagttacctgcttatggacctgaagtataaagcagaaacaaacgtttattgttttaggccactgggacttggagtggcttgattctgcagcatgatctaactggccctgatggacacagccagtggatgttcccttggatttttccttgatctttactctcttatttttcagactgttcgcaaatcccctcctcagagaggtcctctccgtccatttccccagagccactttcaattctgtttccttctcttttttttttgacagcggttactgccttctgacattattttatttacatttataaataacgtgacaatttataaataaagtgtttctctatctctgtaattttgtcatttggagaatgttatacgttgaatcatacagtgtgcgggactgttattttctgcttaggccttgaggttcatccaacttgctgggtataacagtggttccttcctttttattgttgaatagtatttctatggtgtggatgtactatggtttatttaatcatttacctgttgaagggcatttatttatatctataaatacagtccacttactgtatttcattatctctgagatggaaacttgaaataaaaataatttttattttccattcttgtttctgtttttctgtttttactccacccagcccccctaaagtttttaacatgattgcttttctgaaatcaggatggctcttagagtccacagtgtgctattcaggccatgacacaggtgaattacctgtgcaggtgtgaacaaccaaatgaccagtgaacacatgtaactaatactcaactgaccagcatcagtgcactggaaaagaatccgagattggacaatggagccctcttttaacccctatgaatgtcatggatgtggggacagactggaggactggagcaagtcaaatatgtttagtgacattgctgaagtcagaaccgaagcagaaaaactgtatataattttaaagagtcctcaaagcccagcactcttgactttcaatctttttatggattctttgaagaaatgccgtataatcagtgctcgtggatgaatgcacagaggatgatagagcatggaaaaaccccaaacattgatgagtctgaattgaacagtgattcagaagaattggactcagtgtaaagtagtttgaggaataacaaccaagttatttcacttgtattttcatttttatgtatgcacaatagtaatatgtgataaaaatctgtctaattaagtctcaaagaactcttacaataagtaaaattaaaaattctaaatgataagaatgcattgtgtcatggtttaattggcagtgtatttttctttcacaggggaacaaaaaataatggtgcttcttgcaattgtgtttctcagaggtgatgaaatgtggtatttctttcagagactgcccttatcacaaagacatctgctgtgtcattcagttcaattttagttgagtttaacaaggcctctggccatttagaaagctggctcatttggactcagaggctaccgtgattttaaatttgaccagatacctggactggagaagagctagagttttgtttctagcaaatccattgggtgcctaaggtaggctggccagagagtctgctcctggttgagactgggccctccaccccatgggaacagtaaaccacagaacttaggcaccatcacaatttttttctgcattcataaatcacctgactactattaatattcttcatttctgaagtcttttatttttcgataattatagatccacaggaagttgcaaaaatagtacagagaggtcccagggacctttcacccagtttcctccaatgctaacgtcttatttaactatagaaattgccaaacttttcagagtgactgtcccattttacattcacatcagcaactgggtctgggtgacccagtttctccacatctttgccagcatttggtgttgtcatttttaattttagccattttgataagtgtgcagtgatatcttatcatggttttactttttcatttaccattgagtttggaaagttctttataatattctgtctggatattggccctttgtcagatatgtggtttgtgcagggtcttttgcagagcaatagttttaaattttatttatttatttattgtggcatctcactctgtcatccaggctggagtgcagtggcacgatctcagctcactgcaacctcttcctcccaggttcaagcaattcttctgcctcagcctcccgagtagctaggattataggtgcgcaccaccacacctggctaatttttgtatttttagtagagacgaggtttcaccatgttggccaggctggtcttgaactcctgacctcaaataatctgcccaccttggcctcccaaagtgttgggattacaggcatgagccatggcacccagccagtttttaattttaataaagtctaatttattgattttttttcttttattgattgtgtttttttgtgtgacatctaagaagtctactttgatcttgggtctcaaagtttttctccaatttttttctctaaaagttttatagttttacatgtaaatctatgatccattttgaattactttttgtataaggtgtgaggtgtagaatagatttttcttttctttctttcatttttgcctacagagtccatttgctccagcaccgtttgttgaaaagattatccttactccgttaaaattgcttttgcacctttgtcaaaatcagtcaagcatatttgtgtgggtctatttctgggatctttattctgttctattgatttaggtgtttttctccattaccatggccctctctggattactgttgccatagagtgagtcttaaaatcaggtaatgtgattcctccaactttattctccttttcaaaatacttgagctattctagttcctttgcctttccatgtaaattttagaacaaaattaatgattttctttaaattgatggttacaactttatttaaaaggaaaacacataagtttgctatgtcagctagagctgtactgtcaaagtcagttaaaataaaaatataacaattatagtttaaaaaactatctgtgaaccctgtgaaatgatcccatgaacccccagattggcctggaccctcgtctcccagcacccctgtgttgggaagagcactctgtggtgaacggctggctctacgtgtctggggaaactcacatggcttggccgcctcattccgagctggcttagtggtgtctgtgtggccccacagcaatcctctatggatggcttgcggctaatgtattgaccgagagggcaagctctgcccaactgtgaggctccatatggactaagtgaaccaatcagatcctccctcaacacagttgagtgatgggtagtagagagtcagtagttggcagggggaatagggtggaagctatgaaggagcagagccatgaaggagtgaggcatgaaggaatcagtagactcccatggaaagagtaactgattcctcatggtgggaagcacttgagctgggagccgtacttcctttggtctgccagcagcctgggaaggatgggaaactagccaatgggcactggagctgtcctaggtcctgaacagccttctttcctccgtgaaaggcctgaatctggtttgtgttctcttcttccccaataccccctacccccacatttaaggtagtgtttccaaagcttgggattcgtagccgtggaagagcacaagatgacgttagggtgcgcagaacctgggattaaataacaacacatcacagaatcagcaagctaccccctttccagtgatctcagcggaataggttgttaacacctggtccttcctaatcccttttaacaaagagaggtggccttggctttacagcatttgatgaggaatgcctctagcaaaaatttcatagtgcttttctgttttcattatggtttttgacagtaatttgcctactcatattttcagtgcctagcacattgtagaggttcaaactctcagccattgaattaatttgattatttttcattattctttgatttttgtctttttaacctcaactgactatgaactccttgaagtcagggactgtgctttttatttttattttttttagaccacggtctcactctgttgcccaggctggagtgcagtggcacgatcataactcactgcaacctcgaccaccacctaggctaaagggatcctcctgccacagcctccagagtagctggcaccacagatgtgcactaccacacctggctaactttttaatttttgtagagatggggtctcgctctgttgctcaagctggacttcaacttctggcctcaaatgattctcccaccttggcctcccaaagtgcttagattacaggtgtgagccactgcacctggccctgcttttgttttttatttgccattttgctcctagggcctagaaaagtgctcaaatacacaaccattgcttgttctggtgagtaagtaggcaggtggagaagacacaggaaagttgagtctaacaggctgggcttggtctccatgctgatacccagaggtagctgatggaactggctagtgtgagtcccgttcagagtctatgtcagaaacttagctggtcgtcccttccttgaaagccttattggaagaacagtgagctgtgtacttgttcttcacacaagcctctctcccttccctcctgggctgggccttgccttcactccagccatggcaggcctggccctacctggctcttcagagctctcacccacctgggacttctctgccgtggaagaaaaaaccatgtcctgggcctgtggaattggaattgcaccttcggggtccttctggggaggaggatgggtttcctgatcagaacatggccagattttcttcttaaaggctggatggttggcccgaggatcagtctgaactttaacttcactttctccttttcttggcctctaataattcagtgtgtgctgaggattgtattgcaagtctggccaaggatttctttaaaagaaaatccccaaccaggctggacacattactgttgtcagcatgaccgttagcctccttcagagtgaaggtcaacaaataattttcagctttgtttaaagccactttaatggattctataaaatgctctaattaccagtgattatccgctgagtgctcgcaagctttttaaagcttttctgtgcccatttaactctgttcacacagagttcaagttgtctgatgtacttaagcaagaggaggcattttgtttctttctatttcttttttttaaaatcatgtaatttggagtgtttttaaggcaggctagctttctctttttttcatctgaagcagagtttttactctgctttccatctgtttccatcttgtcacccaacaagaaattaaatgccatttaaatgatatgacagtcgcttccttaccacacacagtagaacataactgccttcaatgtgcacaggattctcacaggtgtcgtctcagttgagccccaaagaaggaggctggaggggttgctgaggctgggattcctcaccttctgcactcctgacatggaagccttgatcagttctctgtggtggaggcgtcctgggcattgtagggtgcttagcagcatccttggcttctacccgctagaggcctagcaccctgccctagttatgacaattaaaaatgtcctcagacattacccaatgtccccagaggggaaaaaaaaatcactgttggttgagaacagttgacttaacccattttcatatgaggagatggtgacgggaagggcttgcccgaggccctacagttggcgtgctgtggagggtctgtcagcctcttctgttgctgcactgatgactcatagaaaccctcaaacccagcagaggcaccattctttcctctcctaccccctgtgtcaacctccctgcctctcgtcctggtagagtcactgccaacataagtgcgtcttttcagcaaatgtgtcttctggagttgatgtgtttcaggcttctgttcttctgcctcctaagtttcatgtcctagaggacatctcatttaatttttatagtgtccagaagactgtctggagggctcttgggcagggagggcctgtgaatttgtcccacagtgcttgttcctgttacctggccacaggctgcccccatgcacgggcaggagcagtgaggagtagacctgctggggtgggagggaagatgtactgacagtgacccacagttctgagaaattatctgtggatggtccggttcacgctctgttcatgaaccacagccacagtctcatgttcattgataaccatgtgtggcaccttggttaattcccagctgatagtgtccttagatggtgaactttgaccggaccctttccccacatgtatcctttctggcccaatcttgctctctggctaaaataattgacttgggtcacgttaccattgggctgagggacggaagattgtgtgtgtgtttgtgtgtgtcattgtctttgttaagggagaggaggggtcggtcctttaaggtcttaccctttttgaaaatgttggattaaacaaagtaaaacaagattctttattgcaggacttctcagagcctttacctggtaatgtgctctatgattattccagagcaatacaggatgcaacatttcccaaagtcatttgaccacaagacctcttttcttttcatggagtatcacattccactgtgtgcatgatgttctgtgggaaaagtgtcacctagatgtgaaaggacacctcaccccactttgtgtttggccatttctaaggtggctttgaaactaggaaggatgaaagaatgtcagatatggaagcccacaccctcttttggtttggtggctctcagtggctggattctgagcaagaccctggaggagagaaaatccttctcacatgactggacattcccaaagctgggggagttggtctggaagacctgatttccctgtccatgtgagtggccgtgggagtggtatggtcggaaaagaggggaccaagggagcccagacagagaaatgcccaccctcaccctcctcctcctcaactgaagaggagaggtgcaaggggaaagagtgcaggaagagaaaggagaacagaagtttccatttgtaccggatggttttgtttttttatctgtttgcaaatgttcagtgtaatggtttgaaacccagccgtgtagctgccgccgcccacacacagagctgccgtggcactgagcttcagcaggcaaaccatatcaccagcgtcggccattaaacccgagcccacaccagggcaggctgcacacctacccccggtgtccctctgccacccccgccgccccagcaaccccgacacccaccaccctccacacacacaatttttctttttttaaatttccagcagtcggtttttctctagagaaggcataaagagaagcagaggcagagatgggacgagcagggagaatgctcctgcctcatcggagccaccggttttcgggagagagcggcagcccccacctgcctgtggactgagcacttaaaggtgagagaggactttgtgatttctttgtgcacctggagttctgggatgcaaggccagatgaagggatcttaatcattgagcctggtctgttgcctcccgagtgattctatcaggcaagcatgatggatgattccttccaagcacacgcagttatctctgacacgagccccactcaggtccccttgagatctcttgaaccaaggggcttctagcccctcctcctcacctttcagcacagccttgtaaacctcagatgtggatgaaggtgccgtcctgcctttgacttgacctgttgatttccaaccggggctgctggcccttcctctctagagtgagtagtgactcacacttttggggccctatgaaatggtcctccatccaaggggctttgggaagcctgtttccctggtggccccaagcccagtaaccaaaagcaatcagacccagctgtccagctaatttttttaaaataggcttccttcctagtagaaatcaacaaagtctaaaatagaagggactctaataggaaatgaagctgcagagttctgtgtggaatgcaacaggcagggacctcggcatggaaaatactaagtgcagattacatggctgacaaccatgggagcaggagaaggagtaatctccttgcttatcgagcatgtctctgggtcggaggggagctgagtggggacatcgcttctggaaggtttagacctttcaccaagaaggagaggaaaaaggaagaacaacaaagatggagaaaagggggaaaagaggccgtaatgtaatgtacatgtagaagagaagcagacaaaaagctccaaattctgtgcagtcaggggatgaatcagttagtaaagatctatttttagtttccaagatctgctgttacattttgcctggcattaattaatgtcacaggcatgttccatgcacaggctctgaagggccctcgcgtgtcactctagctggaggtaccagcccttcttaatgggagctctccagtcctttggggtctggtctctgacacaaacatgtgtccagaatgttctgctctctgaccttgtcccctctgggtgtatccgttaatctcctcactctggcccttggatgtctggccagtggccaagggagaattgcaattgttatactttgttttttaaaaggaaaggctgtacaagctgaaattgggaaaaggcaaagatgttggatcatggcttagaatttaaagaaaaggctttgagggcagctctcctaccacaaggaagaatgaggcccccctcatctccaaacaaggctgattttgactaatcagatatcataactggagaacatcttccaatatagtttaggcaaagtgtaatatgttagcaagaactaatgatatgactggggttgatcagatgttggctgaagttgtgtgtgagactaattatctccaaaaaacctgttcatatttcagaggcgaggctgtaaatctgaagagcagctgaaatgcaggcatgattgtacgcatgaagccttgctttctgaggtggtaaaaggggggattacaggccagaatgaaaaacccaaggccacgtggcagcacactgttgggacagctgtttttgtacatttgcaccaattattagatcaataagaaagtatgactacatcatggaccctaattagaagagacgtcccttatactctctgaaatgcttgagaatgttctcctactaacctagagcctgatggggccattgacgctaattgttaagtgccgttggtcaaggccaatgcatagtcttcgtttagttcctaagtcatttgtggtcggcccatccaagacagggacacggacaatctcatcagagtaggctgggagggtttccatgatggaatggggctggcctctctgttgaggggggatatccaaggggtgcacatgagctctgaggaccagtggcaaagtccctgttcagtccttgggaagcatcaccactgctacatttctgatgttctgaagatgggttagaacagagcggccgggcgcggtggctcacgcctgtaatcccagcactttgggaggccgagacgggcagatcacgaggtcaggagatcgagaccatcctggctaacacggtgaaaccccgtctctactaaaaatacaaaaattagccgggcatggtggcgcgcgcctgtagtcccagctacacgggaggctgaggcaggagaatggcgtgaacccgggaggtggagcttgcagtgagtcgagatcgcgccactgcactccagcctgggcgacagagcgaaactccgtctcaaaaaaaaaaaaaaaaaaaaaaaaaaaaaaaaaaaaaaaaaaaaagaacagagcgtgagagcaagcagggtgctgactctgggtctcatgtcttgaggctcaattccatcctgtcacccagccaggagattcagaggtcctgcagcctcctacctcagacccacatacctggtgtgagttctgccctcctgaccacaacacccctgcaccttggacacagcttaccacatccttccccagagcatcttgtgccttggagagcaggtgcagttgcagcgttctgggctgcgggcactcgagttcagccctggccagaggctgtgaggggcagagccaggggatggtgtctccattggtaacgagggtctccatcccttccaggctggccgtgtctgtggccacagatgaataggatgggtgcccatcttgatgggtcagacaaggtaagggctctcagaccccatcctctgtttgagatcagaccagaggtgccatcagaaaatcaactgaagattaaccagcttcctctggtgctcaaaacctagactccctttgctgctttgcaatttctttctgtgtgtggaggtctgataagccagacgagatgaagggatgttaatccttgggcccagtctcaatggcaaacttccaattaaagaagatgtgactgtggcctggggctgtgccaaagaagggctttgcttatgtctctttgtctaatctctgtaatggccccatgtggttggcgccttccccaataccattttatggaggaagaaacggagtcttatacatttcattttactttttgcattgtatcttaaagatataaaactttaaccttatactccataatatatctattgatcttactataaaataagatctccctcctccaaaaaaaatcgtgaaggaaaagggttccctcctgagtgagcgccaaaagcctgggcttggcctgtcggagagagaggctgcagagcccctgtatggagagcagacaccatccacagggcccccaacacatgtttcatgcctgagccttgtccctgtgatgttgacactgtgtggatggcggggctggaacttgccctgagggccccagggaatccggcaaggcccagtctccactgcctttttctgtggaatgttccagctggccggtgtgcacagggaaatctgagccgaggccctgaggggggctgtcgtcccacacagggctaaggctctccagggagcctcaatggctggacccccatccaacgccagcgccagccccctttgccccgccatggcccgccttttcctctgtgacctgctacgggcctcacatcctgagaggagccctagaaacgggctctgttgataaaaacacacataccctttgccacaggaaacgtggcctcacgttcacaatggtaaccaccaggctcctcacagaaaccaaagaggaacagattttagatttttacctcaattaggaaacacatgttctctctctctccttccctccctctctcctctcagcaagtctcaattttcctcacatgcaacctctgccctccctatcctagattgggaagctgcacatttaggaaacagagaccgtgttcctttgagtttaggtaaaaactgtgagaaaacaggatataagtcgtaatggaaaccagtggacctcgggtcacaggtagggttgtcagataaaatacaggatgcccagttaaaatgggaatttcaggtgaacaatgaatactttgttagtataagcgtgtcccaaagcctgcacaggatatacttaaactaaaatatttattatttcttcgaaattcaaatttaagtaggcaatcctgtatttttatagatcatctatgaatagtaaccatagcataggggacccaccgtatgagactcagaaccatcatctgggaggaacgttgaggcaaacttctccatccagattaattcctgaccttctgagaataacaaacagcccactatgctgtggccagtactccgcgccagcacacgctgtcattttgtgggcaaggagctctccttgagtctgcccaacggaggtgtgtagtgatttgttgtccaggagagaaacagaggctcagggaggttggtgtggcgcacccgaacgctcagtcagctcctggcctgtctctctgcatagtactcgctggctgtgggcgggcgggccgtgccagcttcagaggagcagtaataacaggttagcttggaagttctccttgcagagatgggaacggctgtgtcaaccatgcaaattatatacaaatacacttggcccgcctgcccagatgggagacccatgagcacagcctccagccgtccatgggtttccgatagtgcaggggtaccgggctgatagcggctgggtctctggagaggcccatgttcccggtacatgtgggctgggacacatgcacacacttactttcctggtgtggatgaagatgcgagggggctagcatggaggtggatgcctaaggctggagggggtgtgttgatgtgtgcatgacctgccaccctgatctgtgtattcccagcaagccacatggcttctgtctcctgggataacccttcctgaggctccagcacccatctctggacagaaggaaatggccctttccctgggcaccctcctgctgagatgccacaggactgcagacctttgaggagaataatcctaaccacagtgatgctactgtgagcgttgaccaggtgtttatgatacacccgaccctgtgctagcatcttgtgcttaattctcccatgtgcctggggctcttgttgccctgacttgacagatgaaaacctcgaggcttagaaaggtaaaataacttggccacaactggtgagataccgagccaagattccacctgagttctgcaggccggtcaggtgaatcgctgccaggtgaatgagggatggctttcaacaccagctcctgggcgtggactttctgaagagagcactgttttgaaaagtcctttatggagatttgtagtagttttagctaagattgttttgtatttgcgctcttagagttagtaggtttgcctcaaatactggtgccggctgagccccatgtattggagatgttctccacgagggaacgctgaaccttcgggagacccataggaggtggctgcccagcccctctgtctagcgatgctgcaaggggaaggtgtacaccaaaggcagggcttgattgaatggttgaacatgctggtgtgggggccatatagcctcagccacaggttgtctttgccagtctctggctgagtggtttggggcgagctgcctcaccactatcaacctcctttcctcatctgttaagtaatatttgtaatgacagcacctccctcacaccccagcttggaggtttcactagtctgttgcctgatcaatcataatagttattagtcattgctgtttgccaggtaccagcttaggtgctagaaagagctagtaatgagaaaaaaagtacagcgctcacttttgaagatcttaggagtccagagagctaagctaaatccactacaatgtaagacaggcataaattcacctaaaagtgtcacagggactctgctgctgaggttcgggagtgggagatcaccacttacagggggttgggggtttccagaggccttggttgaggaggcagcgagtaggtggacaggtggattttgggtttgtggatcaagagaaggaagggaattcctggctgaggaacagcataagcaaagtgtggaggagagcctgggggcctttggtttgattggagggtgcacgcatccatccgtgcatgccggggcagtgggcttggagctggcgaatagggtacaaagtccctgctcttttggggattgcaacgttaagcaagtaatgatacatttaattttttaattgcagctgtgatgaactctggggaatctgagctgctcagggagcaggtgcccgaggcttccctgagggcataagtgaagcttgagtaggaggcagtagggaatggaaagagcacttcaggccttgagtacagctcccttggggcccctgacatgggccagcatccaaggagccaaaaggccagtatgtggctgtgctgcaggcaaccagaagtggggcttgggaagtggctgaggaagtgggcagaggctggcctacatgggccctgctaggtggaggacattactttgttccaagagtgacgaggctactacaaggttttagctagagtggggatgtgtgggtggacttctgtgtttaaaaaagatccctctgctggtggtggagaaggctttgcatgtagcaggggtgaaggtgaagggaggaaactggactttggccagctctggactgtacaacttgaccaaaatcccactttgccatcgccaccatcctcagtccaacagactcaacaactcactctttcccacctgagcagtgtctcatacagtccctgttcctgagctcagcacccacctgattttcccaccacccttgctgccgagcacacgtgcattggcccccagcccgcatgctctgtgttcttcccaacagagccaaatcctgtggaactggacccggagagaacaggaaggagtcaacaagatcttaagcctgctccagaccccttgcctgacttttgagaaggtcagggcccgatttctgtttgtccctcctccctgggctgggcgcatcttcctgggacagcctccccctgggagcggaaggcttggcaggagcagtggattgcctcattgagggagtgagtgccaaggcacacagggccaagcgcttattcgtgctggaagctgccctggcagcctgggtgccccgctgccaagagctgattggaaggctggacggacatgttcaatggttccgggggctcaccagcacaccctatgaagggcaaatgtggttgggggctggtgaccccatcaagctgaactccaggaggtcaaggacagggcaggaggaggctttggccagcatagtcttggagagggaattactgtcctgctactttgtactgtagcaaactctttgaaaaagccacaagcaatttttgctctcccaaaatagctgagagattccattggacaattgcttaccaagtacctaattggagctgggctaagaaagagaaattttcatctactccttcaaggagcacatggtctgatgagaaagcctgacgtataaaccagtcattacagggcattgtcctgttcaggtggtgaggagtgactatggtggcacaggaccctagaggtggtggagactcctgcagcctggtgggttggtcatgcttcacagaggatgctagaaagagctagtcataaaaaaagtgcagctctcacttttgaagatcttagagtccagagagctaagctaaatccactacaatgtgagacgagccaagattcacctaaaagtgtcacagggaccctgctgctgaggtttggcagtggggagatcacttcttgcagtgggttgggagagccagatttggttttcccatgtaggattggggaaagacatacatgcagagactaagtgcttctccaagaatgcacacatgctcattcacaagtgttagtaacccacgtagaaggtacacataaccgtgttgggacaggacccaggtggtgcggtcccagagcagtgagcagaaagcaccatgagaactcaagctctctgctcgaaccctgtgaagccgaagcggtctctaccccaatcccctgcgattggtacctccttttccttccactttcctcccatcctgcagcaactccagtgtccctcttcttcagactccatgaggagttcctccttttgcattgcccttgctgcttctcttaatgactttctctcggagacaagtcctatgccacttggaacaaaacttctcctgtggcctaagctctatgtcatctgtccccggcatgctgcctggcttctctcctcgctctgcccactttgtggggaccctgacaactcatgagccttctgctggtttctgcattgcagggaagagtgcccatttagcgccttggcactcaccgcaccgtcttttgccctttgccctcagatgtgcctggggctgaatctttcttatctcccaggtctgtcttcatagacggcctcctacccctcccctgtgactcatcataccactctattccttttccttcattgtgattttctctaaaatcacttcactcatgtacatattttcctatttatacccgtctctcacactgaaatgtcagtcccatgacggcaagggggccgctttcttattctcccctgatcttacagccgtgaatgaaacttgggatgtgctggggagtcagtcagtatttgctggacaagtaacttgaatacagtttccctgacacctgggagggataatgtcttcctctttcatagcttttttttcattacaatctgcctgtttggcttttgtcattgtttcccagttatcttgattatacatcatacaaaagactatagaacagtctagtaaaggcaaaacctctcagaagtaggaggaagggaaggaagagattggacaaagtcagaacacttgttagcaggcaggaaagcaggcaaggctgggcacatgaatgcactaatatttttgtctgtgtgcagctgtgtctctgtctgcacatacatgcctagagcaccctgatgtgaatgggagcagctgggatttggtgttttgggtgactggctgggctctggtgagaggtgggtttgttcccatcttgctcattagctggtcaacttttcttgctctgtgatctttagaatgagggggtagcaaattggttttagctcaggtgctaaatcttactgggaatgattgccttggaagtccaggtaaagctggcttccgctgcccagcgcagcagggaggagtgctggggccaggccgcactgtctaccctgagtgtaggaaggagagaaggggcaccgtattgtgatgtggctgcattagataatccctgaagcactgttggctctaaaattccaaaagtctcccctcctttgggaatggtaagagatgggttggagaccctgagtgaaaggaacaattctcctcctctgggaagacttcatcttcagagtctggccttgagacacgtgccagaaagcccctcctagagaggaaggagtagggtccacccaaaggtacatgatgagttgtgtgctccccctcatgctcaaccgaagactaaagaggaagaagtagggtccacctaaagggtacatgatgagttgtgtgctccccctcatgctcaaccgaagactgaaattcccagcgcttagaagcaagtcccgtaaaaagctgtatgtatttaacatacactgtatgactttagggataagtatgcacctgtgagaccatcagcaccattaaggccgtagacatattcacctcccaaagtttcctctcgcctcctttattattatctgtggccagaaaacataacctatgatctactgtcttagaaaattttaagtacgtgggctgactgcaatggctcccgcctgtaatcccagggaggctgaggcgagcggatcacctgaggtcaggagtctgagaccagcctggccaacgtggtgaaaccttgtctctactaaaatagaaaaaattagccaggcttggtggtgggagcctgtaaacccagctactcgggaggctgaggcaggagaatggcttgaacccaggaggtggaggttgcagtaagccgagattgcaccactgcactccagcctgggcgacagggtgagactctgtctcaaaaataaataaataaataaataatagaaaagaaagaaaatgttaaataggcaaaacggacactctgctgtgtactaggcctccagaacttagccatctcgcataactgaaactttgtagcctttgaccctcaccttccccatttctcctcccctactccctggtgatcaccgctggactctccgcttctataagtttgactgttttagattccacatagaagtgacatcagatagtatttttctttctctgcctggcttatttcactgagaataacgtcctctgggcccctctgtgttgttgcaaaggcagaattcttaaaaggtggaataaacatctcaactaaatatttttttaaaaagaagaaagaactttaaaaccattctttaaaattttattttaattttttactttttatgggcacatggtaggtgtatatatttatgggatacgtgggatatttggatacaggcatgcagtgtttaataaccacatcagggtaaatggtgcatccatcacctcaagcatttatcatctctttgtgttataaacattctgattatactcttttaatttttaaatgtgctataaattattgttgactgtagtcatcctgttgtgctatcaaattctagcttattcattctaactatagttttgtacccattaaccatccccactttcccgcccactcccctaccctcttatctctgtgagttcaattgttttaatttttacctcccacaaatgagcgagaaagaagaaaacaaaattaaaaactaaaatgaaaacaagtcctactgaaagtgtgggggcggatccgtgtgctaagggaagagggaaatgaggctaggctcactctttcctccggctgtggatgggattctgaactctggcttgggaggcgaattgggtggcttatcatttgagagccctgccaccttccaaaaaggatttgaggggacttacagtgagaacatactcagaggatagacagtgagaaataaaaccagagtgaaaggtcataggccaccaaaaggaagagaaaaccaaaccctgggaagggccagggtctctcagaccaggacttggattcaaggaacagtcatcatttggtttcataaggacaaaggattcttggcttggagaagagttggcagaggctaatatacaaatctgtgtttaaatctgtttattgaaatgtttaaacatattgtttttgtaaatacatccaacagacactgattagccagccccccaagtgatgggtgtggcagggtcccagccctgccattttgttccccatctgggccagtaaactcttccctttaaaaaaacaaataagaaagcaaactccttacataagaaacttctggggctgcaaggagggggaaccagcttttcttgttgtagctgaaatataaacattttttctttctggtcctgaaaaattaatctacaaaaacagtgggtgacaccaaagaaatcacttcaggtgctggaaatgatttcattttctcactctatgattaaaagtcggtagccaagtgctcaggagccacatcacatcttcctaagcaggaatgtaccacaccctgctctcctctggctttgcttctgttcctcaggcgctttcattatctgtgatgcagtgagactggcccgtggcgacagggagctgcagaaggcgattactccgggggagcattgggcactgagaggttgtgtgcctttcccccaggacccaacagtcacagcctggcgtgcgcaggaagccagcttgatggagccatctccgtcaatgtgacgggagcatttccagaaagggtccagggggcatttatttccaaacagtctgtgctgcacagggagaggggacgaggcaacaggtcagcagaggtgaggggaggacaggatgcagggaacttgtttgtgggtcaggaggacattgtcttggcaaagttctgcccactctgtgcccactgaaccacaggtgatggtgacgtggattgtctgttttctctttctcacttagccttccctggaggagtttgggctggagagatcaacccaaacccaggccatcccttttgttcaaagtatcagaccattcagacctgcagtcagcccatttcccaaaggctggtatgcaccccctggggacacttttgtttggtttttaactttttacctcatttatttgacattaggagggactttttctttttaataaactttttattttggaatcgtttgagatgtacagaaaagctgcacagttagcacagaaattcccacatcccttcagccagtgaacccccaccccgcagcatcttacatgcgcacggggcatttgtcatgactaagaaacgcaggtgggtacattcctatgaagtaaactccagactttatgtgcacgtcaccagtctgtcaactgatgtctctttctgttccaggatccaagccagggtgggtggtgatttttcatataacttttttcaagtgccataattatggagttattttaatgaatattacaaaaaatatcacatcaattattatagcttgggacaaattaaatgataaaagcaagtcaatttgaagaggtgtgttatgaaaataaatacagatgacttgtggtacagccctttacttcacagacccaccaagaagctcaggcttgcttaacaccaagcaaatccctaacaaagtcctggtggggctgagataaggactagcaacccagtaccccttccatggcccaacagcgcccctctccctgtttggatgctgcagaagggaggaaggaggtggagaggagaggaactctcagtgggaataaagtttccttttcaattattcagctgatccttgacccccattaccatggataatcaaaaacggggtggatgcatcatgccttaaataaaaacatcgctgaggtggccctgaggatgtgcaagcagataattgcatggggtgttcatccaatgacactccagggggaggtactttcctatatgcacggagatgagagcggtggccctcagcacaatgtcgcacatctgaggagtgttacttcctgaggggggctcctcaggttcagcttcctgttccctcgcacagggctggtgatgatcaacctcttctgacaatggagagagcatgcggtggatgttaggggaaccaaaccccaagagggaaccagcttcagtggaaagcggagtgcgtgcctccccgaggcagggcattgctgagccccagagaggagccctgggttccgctgcctcccccacaggacaaggcatgacagcacctgcattggaatatagactgtgctttggagcctttggcatcagcttccacctggtgcgtaagtctgtggtctctccagcaagttcagggaagtgagggagtcgcagttctctgtcattcagcaggtgtggactgagggctggctctgtgccaggccctgtgctggatgctgggttccattgtgaggccaggcacagccaaggcagagacgaacattcctacagtcgctcacgacaccaagctccacagaccagagaatggacggatccacaggaacgaaagacaggctgtcaggtgcccagccctggggagactccagaagaggagagaggaccacccatcatggctgaccttgggaggacttgggtcttcacaaattgtgttccttggtatatataagagggttaaaatagacacaagaaatatccatctattcccattcatttatttgacacatactcttggggccatgagttcaattcccagaagaggatcatgatggtggggggaggaaggatgtggcgaggggccgtgcaggagcccagggggcttgtctcatggacgctcttgatcgaattcctctgaggccccagaggtgctccttcatccccagcttgcttgtgaggctgcgttggctccccaaggccgagtttcctgctgagacccagccacacacttagccctgagtgtaccaggtggctccactcagagcgctgctccagcccctctccctggggcttcctgccacgtgactgcacatttggggtctggagaagggcccagggactgaactgcaaaggtgaagggtgtccctgctcctcctgaccacagcttctggactggcatgtgtgtctgatggtgcaagaccagaggggcatggccaatgagagagttattctttctacccgtgagtctccctcggacacacaggatttctcatgtctcctcctggttttgctgctttttttttttttttctagctgcatgaggtagttttgtttgaaagaatagtcaatgcagactgcagttttccgaatgaggcttgctcttggcaagtgagtgagatatctttgtgtttgtttgtttccttcagaaaaaagggcctgagaaagcaagttaacaattctttggaaatgatttttctttttctttggtgactgttgccacatgcttagttcattggttattggttgcatgctctggagagtctatctgtaccatggtgcttagaaaaattagaatgggagtgatggatttatttgttatattgaattgatataactcacataccatgcaattcacccttttaaagtgtcggattcagtggcttctagtatattcacaaggttgtgcaaccatcactgtgatctaattccagaacattttcaacacccccaaagaaaccccatacattacagtcactctcactgtctttgtttttttttgtttttttttgagatggagtcccgctctgtagtccgggctggagtgcagtggcatgatctcagcttgctgcaacctctggctcctgggttcaagctattatcctgcctcagcctcctgagtacctgggactacaggtgtgcaccaccacacccggctaattttttgtatttttagtagaaatggggtttcaccatgttggccaggctagtctcaaactcctggcctcaagtgatccgcctgccttggcctcccaaagtgctgggattacaggcatgggattacatgttgctgcatggatacatgattttattatttttatggctttgtatattccgtggtgtatatatgccactttttcttcatccagtctaccgttgacaggcacccaggttgattccatgcctttgctatttgtgaatagtgctgtgataaacatacgagtgcaggtgtctttttggtagaatgatttatcttcctttgggtagatacccagtaatgagattgctgggtcgaatggtagttctacttttagtcctttaagaaatatccaaactgttttccacaggggttgaactaatttacattcccaccaacaatgtgtgagtgttcccttttttttctgcaacctcaccaacatctgttattttttgactttttagtcatagccattctgactgctgtgagatggtatctcattgtggttttgatttgcatttctctgataatcagagatgatgagcatttttaaaatatgcttgttggctgcttgcatgtcttcttttgagaagtgtctcttcatgacctttgctcactttttaatggttttgttgttgtttgtttaagttccttatagattctgaatattagacctctgttggctgcatagtttgcaaatcgtttctcccattccataggttgtctgtttacattgttgattatttcttttgctacatagaaacactttggtttaattaggtaccagttgtcaatatttatttttgttgcatttgcttttgaggacttagtcttaaattctttgtctaggctgacattcagaagagtatttccttggttttcttgtaggatttttatagtttgaagtcttacatttaagtatttaattcattttgggttaatttttgtatatattgagaggtaagagtccagtttcattctggaattagagtggcactaatcactctattcaacattcttctgcatatggttagctagtttccccagcaccatttattgaatagggggtcctttctttcactgtttatttttgttgactttgttgaaaatcagttggttttaggtgtgcagctttatttctgggttctctattctgttccattggtctgtgtgtctatttttataccaataccatgctgtgttggttattgtggccttgtagtatagtttgaagtcagataatgtgatgcctctggctttgttatttttgcttaggattgctttggctattcgggctcctttttggttccatatgaattctggaatagtttttttctaattctgtgaaaaatgacattggtaatttgataggaatagtgttgaattgctttgagcagtatggacattttaatgatattgagtcttataatccatgagcatggagtgttttatcatttgtttgttttctttcagtagtattttgtagttctccttgtagagatctttcacctccttggttagatgtattcctaggtgtgtgtgtgtgtgtgtgtgtgtgtgtgtgtgtgtgttgctattgtaaatgggattgtgttcttgatttggctctcggcttgaacattactggtgtatagaaatgctactgatttttgtacattgatttttgtatccttaaactactgaagtcattcattgggtctaggagtcttttggtggcaactttagggttttctagatatagaatcatatcatcagtgaagagagataacttgacttcctcttttcctatttggatgccttttatttctttctcttgcctgattgctctggctaggattttcagtactatgttgaatagagtgatcagtgccatatcttaaaaataaaacctaattcaaacaaatccatgttgaacaaaatatcaccattttacataaagacagcatcgcagaaatctttcactgggacctcccaccatagtcaattgcagtggaaatgctcattctgggccctcaggaacctctggggttacatgtggaggttctgcaaacacttgttccatccacatctccaggaaaacgaccacctaggctctaattcttaaacttgcctgcacagaacaacctcatctctaatgcaatgtttttttgcacacctacatttctgggcagcaagctctttataggttgttaggtcaatagtaacaattactaaagagctgagcggtggctctttttttttttttttcgtgtctgcttctatctcttcctgttttctaagggttgctaccgtgacgttaggtaatgtataggaaataatttacttcctatttctgggccataccaagttttatctctgcttgagtctcttccaggttgcttgaaatggtgcttttctcagttaaacgtggacttgacataaaggccaagccacaggaggctgccctcttttattttattttattttctaaggctcagggagcatctctccgttctctgagatgctgcctgcagagtaggaactgggagagaacactaaaatgccctctcagcaaagagtagcgagctccctacagagagtgagagcacgggctcttgagctcatctcttctctgtggggccagcccagtggtcctttctggacctgtgggtgtcttctctgggcaaccagatcattgtgtttgaatcagagcatcattggctgaaaacactccactgtttataaaggtatgtaacatgctccatgacataagcatatataaaatgtcagttaaaaaaaaactcttttactctatgttcttaatgatatatttatcttcaagcacgcagttaaagggaaaatgctacgtaaaactgtgtgtgacccagttcaagtaattctctcatgtgcttaatactgctgttgcttttgtcaaaatatttactacaattcaaaatggctgtcagaaaccaggtccacaatccatgttctactaaacagaaaaacatttataagaaaatttattgctttataaactgttttttttcccagtgatgaacctaattaaactgaaagtgtgaattggttagaacatattagcccaagtatgtgtggtatatatatacacatatatatgtatgttttattaggccaagttttttatttgtatataatataattgaaatatcaaggtatttgatagagctactatttatagcaattctactgatcagccacccaagggtagcatttttcaatgagatttacaagggccaatagtccatgtatttatacacatatctgacttcccagtatccaaaatagcaaagagctggaggctatctcagatcagccatggaagccatgctctgagaggtaacgtgtttctcctttcccgtagcaaatctttctgtaagaatgaaaccagagatgttatctaccaaaatgcaacgagggacaggatgcaacttagaaaaatggtaacattagctgactgggaaaaacagaatcaacgtcagggccagtttaaaataatatgccttttaaccaccctcgctttattgccccagctaagagcaagtatttaggaccataggctaatattaatcagagagaacacttaggttctgtggcaatgttggggtctgtgagatttgcttccttagctgtgcttccgctgggaagctggggagggttggtcctgaaggaggagtgccatgtgagcagggttacccaaaagcacctgcctaggggaaatgggctcactatcaggcgccgtggagttaccagctagagagacttttctcctggtagagaccatgaacatcatgtaagcagagaaccaagactgtaaaagggaggtagggtaggctgtttggttaggggagtggggcaggaacagacacagggagagtctaccacgtctggacaaatcacatctatggttttatccaatcctttgaacaaatgaacatgagccccacttttcagataaggaaaacacagcatggagagtttaagtgacttattccaggttacagggtttataggtagcagagcaaaggttcaaagacaggtcttatctccagggtctgggaactttacccaccatgctgcctgtctgggtgtggcatggcagggaaggctgagttatgctggaaggtcacactcagggatttctgcagagtgactttggggcataggtaggaagcttgttctcagtactggcttgttaccaagtgagagatctttgtatgttttcattgctttccttgtagttcctttttttttcttctttttttcttttttggagctgtaatctcgctctgtcacccaggttggagtgcagtggcatgatcagctcactacaacctctaccttctgggttaaagcgattcttctgcctcagcctcctgagtagctgggattataggtgctcaccaccacaactggctaatttttttgtatttttagtagagaaggggtttcgccattttggctaggctggtctctaacgcttgacctcaggtgatctatctgcctcggcctcccaaagtgctgagattacaggcgtgagctaccacacccagccccttgtagtttctttatgatcactttgtattcatagcaatgttggagcttttccagatatggtaaatggtagtgatgtcaattttcctttgaatatataagggtacataagaaaaagtgagttgatataaagaaaatgaaaggaaaatggtctgtgcagagtcggtgtttctccaagggtaggctgtggtactcgtggctagggtcggttctagatacactatggatgctgcagtaaataacattgactcacacactgggaaggttgttcctgttttgattctatttacgtatttattactttcataaattagcctctttgttttgagaacattgcagattcacctgcagttgtaagaaaaaaatacagagagatcccatgtgttttttacccagtttcctccaatagcaacatcttgcaaatcacaatcaaaatattgacagtgatatagtcaagatacagaacatttctgtcaccgcaaggatgcgtcgtggacaccccaaatccctcctgctctcctcctctctctctcccccccaaccccttaaccccaagcaatcactagtctgtcctccagttttataatttgtcatttcaagaatgttatatgaatggaatcattcagtgtggtgtgtagcctttggggactgacttttttcattcagcataattctctagagattcatccaaatgtttcatgtgtcaacggtatgcttctttttattgctcagtagtgttctgtgatatggatgtaccacagttggtttaaatattcattgttgaagggcatctgggctgatgccaatttttgactattacaaataaagctttagaaacattcatgtacaagcttttgtgtgaacgtaagttttcattgtgaaataaatgcccaggagtgcagttgctgggttgaataatagtcccatgtttgatttgttaagaaatggccacccttttttccagaatggctgtgccacttcacatccacaccgaaatggatcctggcaacgtgggcagtgtttccagatcctcgccagcatttgctgtttcactattttttattctagccattctgacaggtgtgaagtgatattttattgtggctttaatttatatttcccaggtggctaaagatgttgaacaccttttcgtgtgcttatctgctggctgtataccgtttttggtgataacttgcttcatgtgtttgcacactttctaattggattgttgttggtttttttttaactgttaaattttcatagttctgtatagattttaaatataagtcccttgtcagatatgttgtttgtgaatactttctccagatctgtagctagttttttattctcttattataagcaggggtttgcacagagcaaaaaaaaaaaaattaacttcgatgaggtccattttattatattttccttttatggctcatactttttgtttcaagtctaggaactctttcccactttagaagtcctaaagattttctcctgtgctttttttcccctaagcttttacagttttatatttcacatttaagactgttttaaatattttgagttaatttctatataagtaagatgtgaggtttaggtcaaggttttttttttcttttttcttttgcctgcggaagtcaattgtttcagcatcatttgttgaaacatctacactctctctacagaactgctttcaacctttgtcaaaaaatcagttggctgaggcaggagaattgcttgaacccaggaggcagaggttgcactgagctgagatcgtgccactgcactccagcctgggtgacagagcaagactccatctcaaaagaaaaaaaaatcagttgggtatatttgtgcagattgatttatgtttttttttttaattattttgttctactcatgtctgtgtctattctgacaatacagtcttgattactttggctatataataagttatcaagttaggtagactgattctttacactttattatctttcttcaaacttgtttgagttattccagttcttttgcctttctatataaattttagaataatcttgtctatgcccacaaaaatatcttactagggttttgataggaattgcattaaacctgtatatcaatttagggagaattgacatttttactatgttgaatcttccaatgcatgaacacaatatgcctctttattatttagactttatttgagttagttcatcagtgttttgtagttttcagtgcgtaagtcttgtacatgttttattagatttacaactacatatttcgtttttcatttaattttggttttcaaccattcatagctagtatatagaaatgtaattgacttttgtgtgttgatcttgtatcctgtgtccttgctgcactcacttattagtgcgaggaggtttttttttttttttttttgtagattctttgagaatttgtatgtagacaataatctcatctgcaagtagggatagttttattttttcatttcctgcttgcaagtctttcctttccctgtattttgtatttctttcttgctttattttactggctaaaactttcagtcatcttctgaatgagagtgatgagagtggacatctttctttttcctgatcttagggagaaaacattcagtttttcaccgttaagtataatgtaaactttggtgttttgtagatgcttttaatcacattaagagatttccgtctatttctattttccaacgagattttattatgaatgggtgttgaattttgtcaaaagcgttttctacatcaattgatataattatgtgatttttctttttaccctgttaatatggtggattatactgaatgcattcctggaatccttgttcaaggtgtataatttttttcttatcacagaattctatttgctgatattttgggagaggttttgagtctgtgttcatgagggatattcgtctgtagttgtcttttcatgctgtctttgtctagtttggtcgcagggtaatacctaggtgcttaaaattaactgggaagtgttatttccttttctgttttccggataaagttgcgtcgaatttgtgttaattcttcttttaaagttagaattctccacatcagggcctggagacttcttagcagggagcttcaaaattgcaaattcaatctgataaatagttatagtgtgattctcatgtgattcaaatgatctgtttcccattaggtggatcatggtagtttgcgctttttgaggaattggtccacttcatctaagtcatcaaatttatgtgagctgagttatttacggtattcccttaaggtcattttaatgtctgcagggtctgtagtgatagcccattttccttcctgacattgatagtttgtgtcttctctcatttgtcctttgtcagtttttgtagagattctaaagaccaattttaggctgggcacagtggctcatgcctataatcccagcactttgggaggctgagatgggtggatcacttgaggccaggagttcgaaaccagcctggccaacgtggtgaaatcctgtctctactaaaaatacaaaaattagcccggtgtggtggtgcgcacctgtaatcccagcatgttgcaagctgaggcaggaggatcagttgaggtcaggagtttgagaccagcctggccaacatgatgaaaccctatctctactaaaaatacaaaaattagccgggcatgatggcagacacctgtaatcccagctactcgggaggctgaggcaggagaatgttttgaacccaggaggcagaggttgcagtgagccaagatcatgccacttcactctagcctgggcaatagagcaagactctgtctcaaaaaaaaaaggtgaattttattaatcttgtccaagaaaaagctctttctttcattgattttctctattatttttctgttttgatttgacctatttcttctcctacctttattatctcctttcttccgcttgctctggatttattatgctttccttttactacagtcaagtgggagtctagagtcttgatttgaaaccctccctctttttctttttctttttaaacaattaatagcagtttattttaaaacatttttgtgggtacatagtaggtgtatatatttgtggggtacatgaaatgttttgatacaggcatgcagtgtgaaatcatcacactgtgggaaatgctcctcttttctaatgtaaacatttagtgctataaatttccctcccagcactgctttagctatgtgccacaaattttgagatgtatttttgttttcacacgtcagtgtattttttgattaccctgggggcttcctctttgacccatggattatttagaactgtgtgccattttgttttcaagtatatgaagctgtcctgttatctttctgttgttgattcatagtttgattccgttgtcgtcagagaacatgctttgtatgattttaattctttaaatttgttgaggttgattttatggcctggaatgtggtctatcttgatgtagcagtctgggtccaatcaggaagtaggagccatacaataggctaaatgagagaagctgatgataagaattactaactataatgaagagggactataagacataagggaactccatgtggcaccctaggattgagattcagcttctcaactgaaagagacagcttccatttctcccagcaaggacacacgtggaaggagtcagacctccctggaagagatgtgatttgcccactggatagcagaggagttggctggcttagcaagactgaagcttatctggagttgctgggcaaacaatgggcaactttctggagtacaggtgggaggtggcaggcaatctacaaccagagacgtgggtgtgttatgggagtctggcactagtgggacagaagtctccagagctcccagaaagacagtgtgccggctgtgtggttgcagaaggagcagatccatgtgaaccccccagccacaggcaggctgtgcaacagctttggtttttatgttgtgggggctgcagacagattactgctgggctgaggctgcaaggttgcagagggagtgagtcctggggcctgtggctgggagggggaactccatggcatgtcctcatacccacaccactggccctctcgtgggcccctcctggaaactgcaggaagcctcttcctcctgcaatgaccctccaacatcctctgttggaaaaacttagcactgtgtccactttaaaggagaaaatctttaaaagtttgcatcccttatcatacagcatgtattgaatggcattttttggagctgagaggcaataaatttctatctggcacagtctatccctttgcctgtgcagccccatgtgtaccctttacatgcatgtgaactttcttacaacagaatggctctgtatttccacctaacaagatacatccatgcttctagcaagtgaagaggttctcacttgttcgaaatgagcagatgcagtcattgtactcagcacaggctgtatcaattgctcttcaaattcagtcaagctctcactgaatattctgttccctaaagcctaaattgtaaagttaacttccaataactcatatataaaaatttaaaacatgaagtaggagaaagaagtagagaatgattagtaaagataaaataaaactcattcatataacacacatagagaccatacacaaaccccctccagtcctcgtttatataattgatcatgaagttgtagttcatatctgtgactttcttcttccaccacccattccacatcttccttgacctcagctgccctgggttctttacctcttggaatatctactaactcctgaaaagtatgagtatgtacttttctcccaaattgcagttgttccactatgtggcaacaggtccctttgagaaggcataaagaaagatttacagtgtatccttttggcaatagtagagtgtccttttcaaggggacctggctttcccttcaatcaagggcctgtaggtctgcaaactgccttagttctgaaaactgggtaaagggccgtgagtctccatttgatgactgagtcacgttacttgccaccacacttaggacttttcctatgatttcctatgatatcatagtagactgactggtctttccctccgagggacaacgtgatcagttagttactgctaagatctctgcgagccaaagaattcggattcctgccattccctgttgctcccgtggcacgctcaccttctctttggcaatgaagtgatgccacttggtcctctgctattctgggaccccccaacaaccacagtgaaatgagggagcctgtctcaatagtggtgtcccctacagctcttcctggcctggaaaaagagcaaccacagatcttttcggggatgcggatgctcccctcattaatgcatttctcagcgccctcctgaagaggggccttctgggtcttcttgaggcatgccgctgggagagttggaggttgcctgtgatacacccggcccagcaggcatatttcccatagtctttagagcccctcctctgtgtcatgccagggaagctccagcattccggcctcactaaatgcaggtcaccatcatttccagatttcagtcaaccaacctaggaagctgttaaagccacatccagctgcacaactaatacactaaattgagactctctggtaagtgcactcctgtcaatgaatttggtccaatggctggtggtgttttctgccctccttggtataaacccacagaatccatttgcacacacatgttccctaggattctgctgacatattagccagggcgttcagctcttctggtgtgtgagccatttccttctgggtcatagtgagcacctgtctccttgggccatgctgagatttgactcagttaaatctagttaagtctagagggagcaggggcttgttgtggtgggttctgagaaggatcagtattccctttcaaggcatctaccctaagtgaaggcatcataaggttttccagctcaggaagtctggcctctgtggacagtggaggggaagctgctgccacttgtacgggaggctcagaatgacctggaggtcaatgttgtcagtttctctaggtccaacaagatgtcctcacctcgagttttaggatccccttttttcctgattagtgcccaaattttcacatgagaagcttggcatgactgtgaattcaactgccattttaattcagtaacttgcaccattaatttttttgtttgattttcagcaacatcagccctgtggctacaaaaatgagacattctttgagggctgtcatggaggctgtgtgatcctcagatcatgactcaaggtgggaattaatggacctgagcttgtcattttctctctgtaagtgctcaaggacgcgaaaagaaatccatttcataccacatcccttatggtcatcattcctgccatacagcaggagcagaagccacttgagcttccaaggcacatgttctaaattggcactttgccgcaattgaccacaggtgatggctttattaattgtgatgcttttgtacctcacaggttacaagagtcacatttctcattgtcaaggagctcaacactgtgctcacatccaaaagcacaaccacactagtccctaaatcccatcattagggatctcttgggaccattcccagagacaattctgtagacttctgtgcccagtcagaagacagaaaccacccagtgggttatgcaggggaaacttggcgtaggaatgattagttacaatgaaagagtgactattaggtacaaggaaactctatagggtaccctaagattgagggagagtactcaagaaacaacacacttggaaggcattcaggtctcattggagaagctgtgattttagccaccagaaagcagagaagttggctgattcagctagacttgagattgtgtggagttgctaggcaaacagctgacaaccctctggggtgctgctggatagcagaccatgcacaagcagagatgtgggcatgcatctgggagcctgggcacagcaggacagaaggctttggagcttgtggcatgcatagaggaagtggggcttgcagaggaaacggccactgtgtgtggactcctggccacgggaggctagctggctttacgcggctttagtttccctgtctggaaggctgcagatggattatccctgatccaaggctgtaggctgcacagggagcacttttgcagcctgcggttcaggctggttctctcagataccaccgcataatggttgctctaggtattacattttatatatatggaacttatcatagtctgctggtgtcgttattttaccagttggagtgaagagtagaaatctcacctccatttatgccctcacatttagaattatcttaaatatttcctttacatacatttagaaccatatcagacagtgttataatttttgtttcagccaccaaacatgattaagaaaacttgctcgggagtgttggctcatgcctgtaatcccaggactttgggatgccaaggcaggaggattgcttgagcccaggaggttgaggctgcagtgatccatgtacgcaccactgatcaatgtatgtgcactccagcctgggtgacaaagcaagaccctgtctcaaaaacaaaaaaaacaaaaaacaaaacaaacaaaaaaacaccccaaaacaaaaaagaaaaactcaaaagggaatgtttttacccacttttttactgtttccattgttcttttttccttcctgatgttccaagtttctctttttgttacatcctttctgtttagagaactttcattctttgagggtgggcctgctggtgacagattctatttgttttcatttatttgcgaatatcttgatttccccttcattccaggaggatattttcaccggatataaaattttgggctgacacttcctttccatcagctcttgaaaaatgtgatacccttttctacttgcctccaagtttctgatgagaacctgctttcattagaattgttttttctgtagctaaggcattgtttctcacttgcttctttcaatattttttatctttagagttcaggagtttgactatgacgtgctttggtgtggatttctttgggtttatcctggtggtgggggtgggggtgggtggttctctcagcttcctgaacttgtagctttatgtcttctgccaaattgaagctcctgaacattatttgagcactttttaagctcatcttctttctcttctccttcccaggctctgatgataggaatattagaccttttgttagtgccatgggtccctgaggctgttcattttttttttattttttttaattttcatcctgttttctctctgttgctcagattgggtaatttccattgtcctatcttcaagttcaccgattctttttttctgtcctgtccattttgctgttgagggcatccactgagtttttacatttttgattatagtatttttcatttctattatttccatgtagttcttcttttatcttctatgtctttgctggggctttctatgtttcctttgtttcaagcatatttgtaagtgttcatgggaacattttcatgatggctgcttcatagctgtcagggaatcccagcacctcttgcatattggtgttggcatctgtgcattgtctttttcctttcagtttgaggtcttcttggttcgtggtatgacaaatgatttttaattgagacttggacattttgggcattatggtatgagagtctgggtttagtgacccttctgtgttagctggcttcctttgctactgctctgactggggaagagatgagtggaagttgaggttccctactcagcctctgttggtactcattgggaaggccctgttacctcctgggaaggatagtagcactggctttctgccaggcctttactgacatttccctgtctggaagagctaggaatgccttattattgcctcccacagaaagagggagtggattaacacactgtggcacacccacaccgtaaaacaggacttggcaaggaaaaggaatgaatgattggagcacacaacagcttggatggctctcaaaggtattgtcctgaatgaaagaagctggaccaaaaaagccgcataatatgtggttgcatttataggacattctggaaaagacaaacttatagggacagaaaacagatctgtggttgccagaggctggaggtggaggaagggattgaccagagagggaggcatgatttggggatgtgatggccttcttgattatgttggttgttacacgactgtatttacttgtcaaaattcacagaactgtacactaaagagggtgcattttactgtatgtaaattgtaccttaattaaaaaaatacatcccattgagagatggagaaatttgaggaacatgatctcttgccacctgtcagtctgcagccatagaatcatgttgggtcctaactgacataccttttctgagtaacccccctagacccactgtaacacgcatgtgtatttcgctttagtgcgtacattatgtccatttataaagagtgcctatccataccttgtagttctgacatgggcagtttaagaggtagggttaactcatataatattctgaatcacgtcagtatttgggacgcttcttcctaccctttatttgaattcagcactgcatctgtttgctattttcctggataattattgtaattatataaaagaataaccatcatcaatacaatattctgaattcattatttcacatcctaaacaaatctgttgatagcctgctaggcaatcacgaatcgtggtgctatgtaacattttattttgtgttctaagccacgaggaatcaagataaacctccaacacagccaggcccatactggaaagatctgcccttggcacacaacagccagcagaggtcaccttccaagtggccctcagtggtggaaggagagcagttctggatggcagttctcatccttgtgctggccttgtcttctgtccagcaataaagctttaggctttgctttctccatttgccgtggaggagagtaacagtcacagcagtaatcaagacaggcgtcttgtcatttaattaagcatggcatccctagtatccataatttcaggtcattaggtacccagacattgttctctccattttgcagatgaggaaacaaaagcccagggaaatagtatacttgcccagaaagaatttaaaaaaatattgttgagcaggctagcgtctgtgggtgcagttcctctgattcagtgtgtcatgccgcaaacatgccaggcacattcccacctcagggcctttgcactggctgtttgcatccattggcctttgcattgcaggaaacactcttaccccaggtaccagcatggctcattccaccactaggttcccatgttaaaaccaggcaagtctaggacaaactaggacgagttggtatacagtagaccagtaaatgaaagagcttgtgttatggagctgacattcttgttagggatgctcacctggcccatctcatttaaaattgcactcttccctcactggctggacgaggacggtctctcctgggattgcttggctcagctccacatggtcgctcatcctcctgggagctcatctgggcttgttctcatggcagaagcagagcagaagcgtgcaagcttcttgggacctaggcacaccatccctaatgtgacacgatgttgcctggagttgaggagtggagaaaaagtctccagatcttgatgggaggagtagcaaagtgcccttgcagaagccacagaaacagaaaggtgtgaagaagcgaggctgtttttccgatctgctcacagtacttctcagtacctccaactcagccagtttttcttttggttttgaattttgtcttatttcctggtttaatcaacagatgcggcgagaagcttgtatttttggcacatgttgtaccaaaaatactggaaacactggagtcgtgtttagcagtagctgtgagggccatgtggggctgagcctgcttgagggaaccagggcttcaagccccctcctttcacttgggcattatgagttgacagctaggagcattaccaagtggtggaaattgttattttcttatgcagcctgtgaggttgaattcaagtgaattaaatttgcacgttaagggactctgctgtataaacctttgggaatttctgagaagtagaccagaacagcatggtttggctcaagtaagtgaggaacctcttcagaggagtttcacataaaaatgccttccctttttctcaaatgtgataatttaagtcaggccatttctttatagtcttatctaaggctataattcattcactcaaccaatatttattgaacacctgctatgtgccaggtagtatacagggccctgggccatcctgggtcagtgatggatactatgcagtcattcagtataatggttcagaaagagtctcatgccttgaaaaaaatgtattaataactcactctacaacttggatatactaaaagaaaatattcctttacttttccatagctgatcggatcttctctaagatcagtgggagtggaagaaaaaacatgtatttattgattccattaggcttttactttggccaggcatgtttacagttcatttgagtatcacatgatgccatgggggaggtgtcaatatttttccattttacaaacaagaaaaccgagtcctagggaggctgtgcagctcatctgagtcacaggacttggaaatgcatggtgggatttgggtcgtcctccagagcccgctctcttttaaacactctatcaaataaacacccagtctccttatgtccccatatgtcgtgtccttttacccatcctccacccccagcatgaaggacttgaagggcggggggtccaccctggagccctcattacagagcacctcttcccactagttgtccccaccctggcacactgtgagctccacgacagactctgttcatatcatgggaggaccacagtggctcaggacagtgcagccctggggcacccactgcccgaccgtgcctcacaccaggtcacacatggacagcctgtgaagacgactctttatagagtccatcaatgggaagttgggggatagccctggtgttacccccgcttgtacctgctcctctctggttgaagcctgaccctcccacttgccttcctcctccgcacccatccgcttctcactacagtccagcgaagggcagagcttcctttcacatcctggatttgtttcctgagcctgcagtaacaaatgaccacacactggggggctcacagcaacagaatggattttctcacagtgcaggagaccagcggcctgaaatcaaggcatccttgatttttagagggaggggccaccctccctctaaagctctgggtgggagagggcaagggagggtccttcctggcctctttcagttcctggtggctccaggcattccctggcttgtggctggattttgccccatctctgcctccgtcctcgcgtgggtcttcgcatggcctaccccctgggtccctgcatcctctccttttcttataaggacaccatcagtcactggatttagggaccccactaaatccagtgtgataccattttgagatccttaacttaatgatatctgcaaagaccctatttccaaataaggtcccaatcgcaggtagtaggggcaggacttggatgctattttggagaatacgattcaacccaccatgcttcccttacataaagctgccctcacctatcaggcagctaggcccatatctttgctgtgccactgttagaggggcatcttctctacaggagagttgtgggcacaggtcctccctccttggagcgtgaaatattaaacaaagagtgaaggtaattttgaaaaactcttcactctcataaacaatatctggctttctagacgatcattttattttattttattttgagacagagtgtcactctcacccaggctggagtgcagtggtgtgatcctagctcaccgtagcctcaacctcctcagttcaagcggttttcccacctcaacctcctgagtagctgggaccacaggcgtgtaccaccatgcctgcctaattatttattttttgtagagatgggggtctcactatgttgcccaggctggtctcaagctcccaggctcaagcacagatgatcatcttatgagaaatcttttttattttttattttactttaaaagttctgggatacatgtgcagaacgtgcaggcttgttacataggtatacatgtgccatggtggtttgctacacacatcaacttgtcatctaggttttaagccctgcatgcgttagatatttgtcctaatggtctccctccccttcccccccggcaaccccacgacaggctctggtgtgtgatgttcccctccctgtgtacatgtgttctcattgttcaactcccacttatgagtgagaacatgcagtgtttggttttctgttcctgtgttagtttgctgagaatgatggcttccagcttcatccatgtccctgcaaaggacatgaactcattcttttttatggctgcatactattccatggtgtatatgtgccacattttctttatccagtctatcactgatgggcatttgggttggttccaagtctttgctattgtaaatagtgctgcaataaacatatgtgtgaatgtatctttatagtagaatgatttataatcctttgggtatatacccagtcatgggatcgctgggtcaaatggtatttctggttccagatccttgaggaatcgccacattgtcttccacaatggttgaactaatttacactcccaccaacagtgtaaaagcattcctatttctccacagccttgtcagcatgtgttgtttcctgactttttaataattgccattctaactggcacgagatggtatctcattgtggttttgatttgcatttctctaatgaccagtgatgatgatctttttttcatatgtttgttggccgcataaattgttttcttttgagaagtatctgttcatatccttcgcccactttttgatggggttgttttcctcttgtaaatttgtctaagttccttgtagattctagatattagacctttgtcagatgagtagcttgcaaaaattttctcccattctgtaggttgcctgttcaccctgatgatagcttctgttgttgtgcagaagctctttagtttgattagatcccatttgtcaattttggcttttgttgcaattgcttttggtgttttagtcataaagtctttgcccatgcctgtgtcctgaatggtattgcctaggttttcttctagggtttttatggttttgggttttacatttaagtctttaatccatcttaatttttgtataatgtgtaaggaaggggtccagtttctgctttttgcatatggctagccagttttcccagcaccatttaataaatagggaatcctttccccattgcttatttttgtcaggtttgtcgaagatcagatggttgtagatgtgtggtgttatttctgaggtctctgttctgttcccttggtctatatatctgttttggtaccagtaccatgctgttttggttactgtagccttgtagtatagtttttctcattctgtgaagaaagtcactggtagcttgatgggaataacattgaatctataaattactttgggcagtatggccatcttcatgatattaatttttcctttccatgagcatggaatgtttttccatttgtttgtgtcctctcctatttccttgagcagtggtttgtagttctccttgaagaggtcctttatgccaatcttattctgcatgccagcccaggcttccctgttctctctgtctttcttcactggaaggaatatacttctcaactccttgatcttgggtgaatccctccatctctcagcgccttattcctcttgttagattaataacagcacctccctgctgcgtggattagatggcttagggcatgtgtagaccttgggcctgtggcctggacatggtgtcacataaaggtcagctccctgtgctgtgaacctgcaaagcttaggcagaagatgtctcaggcagatcaaggtaatactgatgggcttgggaaaaagaaaaagagaaaattagctgaataattttcagcagatttttcccattttgcattatgctgtgatcagtgcttataggtagcatctgtttaatcctcgttatccacattttacaaatgaaaatcctgaggttagggaacttgctgagcttcacagggagggggtaagtggcaaaaccagaactcaaacccaggcttttttcttcttccaccaagaagacaggggacggggatggctgagcgcagctggcaggccctccctcttgccaaagccaacctgacatcaagcttctccttccacacatctgcaaccgattgaccatctacagggaaaccacgtaatttgtgtatgaaaattaggcaattgcaggggacactcctctcctccaacttgcctaagctttctgcacactgtgtgtttgtttgtaaactctcttctggcctgctcctttatcataattgtttaggcaaaacatattttgtcactaaacagaatgaatttgggtgaagtcatagtgggaactaacatgtgtttggccctgacaggaagtgggcagcctcccctgcttttagggaggcgttgtttctaaccagctattctcaccctcagagacccttccagacccttctagaatctgacaaaagttagggctgctcttgctctctgggaacattcacctgcgcacataaggtaagttgtaatttccctttgggtcctggctggcctagatgcacattcaagtgggtgggcgactgagaggggtttcaatgtggggccatttaccaagtgtgggcctggttctgggaagttggggcacctgagggctggcagcagtgggggagtgttacccactccaggcatgagaggccaacgtgggaaccgtggttggacctagagagggccacctaacgaaagtctgtccctgagtagagggacaaaggccaccttggagccaggcctgaccttaccctcctgcctggacttgccagcacctccctttgggcaagcctagctgggtgctagtggactagggagcatgttgctgcagccttgcaggtacagggtctacaccaagggtgtatcaggtgaagactgtaagttaggcaggtgcttttcaaagtagaggaccataccactcaggtgtgcgagagcatgcatggtggcctacagatacatatttgaaaaattttaataggtatttatgttaatggttcgtagggaaaattgatcttctctttttggtgatgattgattcagtatccccaccgcccgcttttatgcccaattattacaagtatttatttcttttggccccctcgttcctgcagtaggcaaaacatgacatcatggtttataccttgcatttcttggctgatgaggataactatcttttcacatctcttttaaaaaactgttttgatttaaaacaattttcgaagttaatagacaatttttaagagtagttttaggtttgcagaaaaatgaggagaaagtacagagacctcccatccacctctttcagcctgtgtccccactgttttccctgttgtgagcatcttgcaaatgagggtggtgcattggttgcaactggtgaacccactgagagacaccaaagtccatagtctacactagggttctctcttggtattgcatgttccatgagttttgacaaatgtatagtggcaagtatttggtattacaggatcagaacaatccctttcactccacccacctcttcatcccctcctcccccaacccctggcaacccctgaccttttcactgtctccatagttttgccttttccagaaggtcatacagttggaaccacacaagacaaagtcttttcagattggcttctttcacttaggaacatgcatttaagtttcctctctgtctttctgtggcttgccagcttatttgctagcttatttctttttatcgatgaataatattccattgtctggatgtgtgtttactgatgtttactgaaggacatcttgctcacgtccaggtttttgcaattacaatgctgatgtttacatcagtgtgcaggtttttgtgtgaatgtcagttttcaactcactgggcaatgatatagttcctcttcctccctcccccctttttttttactttctgaaaattgcgatacaacatacataaaatataacactttcaccattgtgaagcatacagttcagtggcatgaagtgcattcacattgcatgcatcccttttaaagcaatggtgttctaggcatgaggctctacacaggtagggtggggactgagtaacagcgtaagtggtccccatacgtggcggagtgggtgatggtggtccaggatgaacggaagtttgggaaacttgtaactacaccagccatcttagtacccaagttctatctgctaaacgtatccaatatgcttctccatggccttctctttcggggccctaaatgtaaattctaaaaacctacttatggcattttcatgttctctctttgcccaggctcatttgtggtttgcttttgcaaaggagggcttgggaaattgtcacttcttctcttcaagtttctcccacctctttgttcccctctcctccataaagctgcacatttgcgccaaaagatataactgtttgtgggggggaattgggaggaggtggggagctgcacacgcggcagatgagggatgcgccaagttccctgcgtgtgggagcctggggatggcaacagggtgagggcttggcattcagtccaggtgaccaaggggctgtcccggacccttccctcgctcaaagaggtaagccttctagcgagctgctttcccagccccggcccccagcttccccatcagtccaatggggacaataggacttgccatctccttgattcagagtgagcaaaattatctgcagctttttgaggttttcctgagaaaagcgtcatctccctcgaggaaggtgttagtcagctgtcatcttgccagcagggatcagctgttactcaaaggcgtcaatttcgcagtgatcacagaacaggctgcagagagcacaaaatgatcatcgtggcaggtgtgtcggaaacatagcgctcttttcctggcatttctactttgaagccccaagcctcccaccctatgagagtcagttctgggctccttttcctcctccccctacccccaggttgggctaaagtttttggggggcacatgatactcagccctcagctccccaggcaggcccccactgagacacccctcgggtgacaaccccctcaatttggccccattttcccagtcacttcagggcctttctgggtgctctgaaattcgtcctgcagcgagagctctgcgtgtgcctcgtcctcctgcctggacgcacactccgggctgttgatgctctgtgtcctggcacccctctttccagactgccctggggaatggagcaggaattgccactgaggcaggagctggacggacttatttctcccttcctcccttccgtgacctccccacccatgaccattataaccgggggatcaggacaggaggcttgtactcatccagtttccttagggtttggggcttttggaattaaaacgcctttactgagtttctgccacaggaagacagaagccctgctcacctattctccgactcagcatttaagagccaactgcaggcagtgcttctgtgtctgatggctccctgtggccacagagcctaccccgtgcattcatgcgtgcagctggaaatgccaggacatggctgctcccacaggcagtcccgatgcaggcagctcacttgcccctggggtgcatgttctacatgatctcctggtgtcccccagtgggattaagctccagtcacccacagtggggacttgctggacattttgtagcctccttcacccccagccttcccatttccttacaagtgtttcctgggatcacctcccaaataaaatacttgggaatggaatccttttctcaggaacccaccccgagacagcatcccttgctagaggcgatgcatggagactgctgagctgacggatgggggaagagacaagggtaggaggaagacagggtgggggaggaaccggtagttaatagttcaaaatattatggcgtataattgaaaactgaaataaatggagcgcttactctgtgctgggcacagcacttggtgttttcacataacttatttcatctgaacctcctggtggctctgccccaatgccactgttcttagagatgaggaaacagtctcagggccaccctctagcaagatggttaagcagagacagaaattcaggcctactggtctcctggggaggttcctgaaattctcagctagtagaaaggttgcagcgtcttgaggtaagcctttatcttccattcctattagctcttatccgttctggcagctacctgttaatctctaaagattcctgcctttacatctttccttaaacaattagaacgtctcagattgttttgaagccaggggctcttgcagatggcctagtgtggtgaggttcataatgagaccagaggtttaggagagggacagagagtgggtgcaatggtcttctgggtcctcccttctgctcagtgatgtgctggtaaatgttgagactggctttcaggatgaaaaaaaaaaaaaaggactgacttgtagcatttgctgatttttgtggtgtcagtgcttccactgtggccagttcaagctgtgaacatgatgctactgatgctgaggttgggaagagccagaggtgtgacgttccacactgccaggaagcgttcccaccacaccagcacatcccacataaatggccccaagatccctgagaatggaagatgccatagaatccttagcagtggtgagctctgagtatgtaggagctggtgtgaactggatgtttcttccccccagctccaaatctacatgtaaaatcctcactccccatgtgatggtattaggaggtgggtcctttgggaggtggtcaggtcatgacgtggagccctcatgagtggaatgagtgccttataaaggggaccccagagagctccactggtctttccgtgatgtgagggggcagcaagaagacggccatctaggtaccaggatgcaggccctcaccaggcactgaacctgtcttggacttaaacttgatcttgaacttcccgtctccagagctgtgtgaaataaatatttgtcatttaagccacccaatctagggtatttttgttatagcagcccaaagtacttttaaaaaattgagtacctttgctcaatgaagacaatactttaaaaaaaaaattgagacagtacctgtttacaattgaggtaaaattcacataacattaaattcaccattttaactatttgaaagtgaacaattctatggcacttagtacattcatagttttacaaactaccacctctgtctggttccagaacattttcatcaccccagaaggaaacgttgtacccagttaaagcctcattccccattctccccctcctctggcaaccactataatttgttttctgtttccgtgagtttgtctattccagtttcttcatacaaatgcaattataaaacacgtgatattttgtgtctggcttctttcatgcagcatgacgttttcaaggtgcatccatgttgtagcatgtgcaagcactttgttgctttttatggctgattacgattctacggtactgtatattgccgtttgtctatccactcatcagctgatggacatttctgtcatttctctcttttgactattttgaataaagctactgtgaacatgcacgtacaaatttttgtttgaatacctgttttcaattctttggggtatatacctagacgtagaattgctggatcctatggtaatacatgtttaactttttgaggaactacccagttgtttttaaagtggctgcatcattttatatccccaccagtcgtgtttatgggttctaaattctccacatcctcaccaacacttgttattttattgcttattagtttattattattatttaccatagccatggttggtgtgaagtcctatctcattgtggttttgatttacattttcctaatagctgatgggatgaagcatctttttatgtgctttttgggcatttggagaaaaaaaatctattcaagtcctctgctcatttttaaattgggttgttacaaaaattatctgggtgtggtggtgcacgcctgtagtcccagctactcaggcggctgaggcatgagaatcgcttgaacacgggaggcggaggttgcagtgagctgagatcatgccactgcattccagcctgggcgacagagtgagactccatctcaataaataaataaataaataaataaataaattgggttgtcttttgttattgcattgtaagagttctttgtatattctggatatatcatgcatataatttgcaaatattttctcccattccgtggactgttttttcactttcttgaaagtatcctttgatgaaccaaagttttagattttgaagtcaaatttatttttcttttgctgcatgtacttttggtgtcatattttaaaatccattgcagccgggtgtggtggctcatgcctataatcccagcactttgggaggctgaggccagtggatcacccgaagtcaggagttcgagaccagcctggtcaacatggtgaaacctggtctctactaaaaatacaaaaattagctgggcatggtggcgcacacctgtaatcccagctactcaggaggccgaggcaagagaatagcttgaatccaggaggcagaggttgcagtgagctgagatcgcaccactgcactccagcctgggcaacacagcaggacgccatctcaaaaaaaaaataaaaaaataaaaaaataaaaaaatccattgctaaatccaaaaaagtcatgaggttttaatcctttgtcttctaagagttttataactttagtgcttacatttgagactgtaatcaattttaagttatccagttgtcatttatttgtttttaacattatttgattgtaagtttatgtaacgtatcttttaattagggctgtgtttcacagctggcttgcgcaatttttgaaaatttaacaatcagctctcttgagccagtatgagtggtatgagccagctcaatgtgctgctacttctatgttttttattatttttaaatttttatttatatattttttgagacagagtttcactttctcacccaggctggagtgcagtggtgcgatattggctcactggaacctccacctccaggattctagcaattctcctgccgtatcctcctgagtagctgggattacaggctcctgccaccatgcccggctaattttgtatttttagtagagacggggtttcaccgtgttggacaggctggtcttgaactcctgacctcaggtgatccgcccgcctcggcctcccaaagtgctgggattacaggcgtgagccaccatgtccagctgtgctactacttccgccacaccctgcttagaaccccttactgctaacggctggaatgtggttgttttcttggggaacggagctggggatgggtgaaatgtgcttatggagctccttggtgatgggtatctgtggaaaaaggatctggggacccctgattctctagtcacaggcctgtccagaatttccttcttgcatctggcttttcctttgtgatgtgaagagcatagctggacctctcttgctccctcccctaggatttgccaagctactcctcctggcttagagggaaccagttttgtcctaactcagtctggaggggctttggaagccccacctttgagcagagacctaagtcttgtcttgaggctgaggaagtgctccttttcctagtggtgtcaccagatcaaatacaggatgcccagccacattggaatttcagataagcagcgctcagtgtttccgtataagcatggcacgtgtgagatttgggacatacttataccaaaagtaattctcatgcaatatttgggacatactcccactaaagaactatgcattgtttatcaaatttaactgggagtcttggatttttgtttgataaatctggcaagcctttccttgcgtcagttttttttcttgctgtcttcatcctgcagcagagactcagaacctcagagtgggaaggccctgattccttgcccattttgcagatctggaaacagtcccagagaagaaaagggatttgtgcaagtgcacggaatcactgtgaacttcgaggaccttgaacaagctgcatgactttttcatgaagtcagcacactttctgagtgtctctgcatgtggcactgtgctggtgccaggggatgatggtggcaaacctgccatggacctgtgcagatggcatgttaaataagagacaggattcagacagatctgggtccaaatcccgctttgccacatgtcagcttgcatgacaagttacttcgctgtctgagcctcagctttcccttttggatgagagtaccttcctctcgcttgggatgagagtacattccttaggggattgtcaggcttccgttgggtgatgaagtgcttggtgcagggtaggcaagatttactgcatgaggagagaggagaggtgcccatggtaaagtttggttgttgtctgcaggttttccagcattgtgggccatccagatgatgcggaatggaggttccagaacccacctgccctgcccctcctgcgagggaccagccagctcccactcctggccctccaggggccccaggtggccaggcctcacctcacctgaccctgggccctgtccttctgccgccagagcagggcctggccccccccactgtgttcctgaaggccctgcccatcccactgtaccacacggtgcctcccgggggcctccagccccgcgccccgctagtgacgggcagcctagatgggggcaacgtgcccttcatactcagccctgtgctgcagcctgaagggcctggccccacccaggtggggaagccggcggcccctacgctgacggtgaacatcgtgggcactctgcctgtcctgtcgccgggcctgggccccacgctgggcagcccaggcaaggtgcggaatgcgggcaagtacctgtgtccgcactgtggtcgcgactgcctgaagcccagtgttctagagaagcacatccggtcccacacgggtgagaggcccttcccgtgtgccacctgcggcatcgcctttaagacccagagcaatctctacaagcacaggcggacgcagacgcacctcaacaactcccggctgtcctcagagtccgagggcgccgggggcggcctcctggaggaaggggacaaggccggagagccccccagaccagagggcaggggcgagagcaggtgccaggggatgcacgaaggcgcctcggagagacccctttctccgggtgcccacgtgcccctacttgccaagaacctggatgtgaggaccgaagctgctccctgtccagggtccgcatttgccgacagagaggctccttgggactctgcccccatggcgtcacctgggctcccagcggccagcacacaaccctggcgtaagttgccagagcagaagtcgccgaccgccgggaagccgtgcgccctgcagcggcagcaggcgacggcagcggagaagccctgggatgccaaggcccccgagggccggctgcggaagtgtgagagcaccgactcggggtacctgtcgcgctccgacagcgcggagcagccgcatgcgccctgcagccccctgcacagcctttcggagcacagcgccgagtccgagggggagggcggcccgggcccggggccaggggtcgcaggggccgagcccggggcgcgagaagccggcctggagctggagaagaagcggctggaggagcgcatcgcccagctcatctcccacaaccaggcggtggtggacgatgcccagctggacaacgtgcggccccggaagaccgggctgtccaaacagggcagcatcgacctgcccacgccctacacctacaaggactccttccactttgacatccgcgcgctggagccaggccgtaggagggccccgggccccgtgcgctccacctggacgcccccagacaagtctcggcccctcttcttccactccgtccccactcagctctccaccaccgtggaatgtgtccccgtcaccaggagcaactcgctgcccttcgtcgagggctccaggacgtggctggagcccagggagccccgggacccctggtccaggacgcagaagcctctgagccccaggcccggcccagcccgcctgggctgccgctcgggactaagctcgactgacgttcccagtgggcatccccgggccctggtcagacaggccgcggtggaggacctgccaggcacccccattggcgatgccctggtgcccgcagaggacacagacgcaaagagaactgctgcgcgggaggccatggccggcaagggcagagcgggcggcaggaagtgcggccagagaaggctgaagatgttctcccaggagaagtggcaggtgtacggggatgagacgttcaaaaggatctaccagaaaatgaaagccagtccccatggaggcaagaaagccagggaggtgggaatgggcagtggggcagaactgggctttcctctgcagaaagaggcagcagggagctcaggcacagtccccacccaagacaggaggacccctgtccatgaggacatatccgcaggggcaacgccagagccttggggaaatccaccagccctggaggcctccttggtgactgaacccactaagcatggggagacggtggccaggagaggagacagtgaccgacccagggtggaagaggctgtgtcatcccctgcactgggtggcagagacagtccctgttcaggcagtaggagccccctggtctctccaaatgggaggctggaactggggtggcagatgcccccagcacctggccccctcaaagggggtgatgtagaggctcccaggccagtttggccggaccccaagctggaaggaggtgcccgaggtgtgggggatgttcaggagacctgcctgtgggcccagactgtcctgagatggcccagcaggggctcaggggaggacaagctcccctcagagaggaagaagctgaaagtggaggacctgcacagctggaagcaaccagagcctgtgagcgcagagaccccaggtgggcccacgcagcctgcctctttgtcatcccagaagcaggatgccgatcccggggaggtgccagggggctcaaaggagagtgccaggcaggtgggcgagcctctggagtcctctggagcctccttggctgctgcttctgttgccctgaagagggtggggccaagggacaaggctaccccactgcatcctgcagccccagcccccgcagagcacccctcgctggccaccccacctcaggctcctagagtgctctctgccctggcagataatgccttttcccccaagtacctcctcaggttacctcaggcagagacccccttaccactgcccattccctggggaccaaggcacagccaggactctctctgcagcagtgggtggcctgaagaacgggcatcatttgttgggtcaggactggggacccctctttctcccagcccagcctcaggcccctccccaggtgaggcggacagcatcctggaggaccccagctgttccaggccacaggatgggagaaaaggggcacagttggggggggacaagggggacaggatggccactagcaggccagcagccagggagttgcccatctcagcaccaggggctcccagggaggctacctcctccccgcccactccaacgtgtgaggcacacttagttcaggacatggagggtgacagccaccgtatccatcgcctctgcatgggcagcactttggcaagggccaggctctctggggatgtcctgaatccctgggtacccaactgggagctgggggagcctcctgggaatgccccagaagatccttcttcagggcccctggtgggccccgacccgtgttcccccctccagcctggctccttcctcactgccctcactcggcctcagggtgtgcccccaggctggccagagctggccttgtcttcccactcagggacgtcccggagccacagcacccgcagtccccacagcacccaaaacccctttccctcactgaaggctgagccgcggctcacgtggtgttgcctgagccgcagtgtccctctgcccgcggagcagaaggcaaaggcggcatctgtgtacttggcggtgcactttcctggtagcagcctccgagatgagggtcccaatggccctcctgggagcaatggaggatggacctggacaagccctggagaaggagggccggcgcagatgtccaaggtaaagctgggctttgccccagggcccggggttgagagagcatgttgttatcccgtaagacctctcatgagggaaggaagtctgaagccgtcccatgtagcatctgctgttcactgcttgcttgttcctgagggaggctggggataccacatagacagcaggaaggaataaaggcccaaatgcaaaccaaaacagagttgcggaaaacataaattccaaaggaaagaattactgtactcaagacatgaggtgagatagtcttcataaccaaatgtaaaatttaactgagcttcctggtaacagaagcaaaaagtaaaatgaaacactccatcagagaggtgagctctctggatcattctaagattataagccagagactcccaataattgagagagtctttatactggggattctggagaaggaattactgttgattggactcagccctctctctgaggttcctgggggcagagagaaaagggggaaatgtggtggatgctcacaggtgttctcacttggtgaagaaatgataatgcagagctccaccttgagagggggttcacgcacctggttgtgatgactgagggcttagtcctgctctggagtggcttgggccgcggccactgaggacggtcctggaggctcagcagtcatttaacctttgtggacagtgacaaaggcccggagaccagagtcttgcaggctgttcggctttccctaggtggaacccaaagttgtggggagtgctgttttcatcttgagagtagcgggttagtcagtagggccccaggggtgtgggggctcccggggaggtggatttaggggatagtaaaggggctggtcaccgtgtttctttggcctccagttaacaccgatggcataggctttcctctgcggatcaagcccaggcggggtttcaggaggttctgtccaggaacgctctgccgttgcctggttgaacttctcaggggctcagcccgtttagcaatgcagtatttccgttttgatttctgaagacaggcatcttgtctgcagagcgagaaccctttggagttttcttcatcatgaggactttgagtaatgtgatgccaacatgcttggtgttttcagttctcctacccaacagtcccaggggtgatgccccagcaccaggtgtctgagccagaatggaagaaaggcctgccttggagggcaaagatgtctcgtgggaacagcaagcagagaaaactgaagatcaaccctaaaaggtaggatgagtggccacctctgtcatttccacaaaaccccaagaagaatttactatgggatttgaaaggtatccgtgtgctccagagaaagagttcctgtttcctagggtttagagcttcatgattaaaggactgaatttgtttcccaccccttgcaactcaccgcctgtgtattttttgatggcacctttctaaggccaggaatccagcaaatctttgaaataactgggttgaaaacacatccattcaacttaagtctggaagagagagagcctgttaattatttacagcttttattgtgtttttaattatgcaagcaatgaatgtcctttgcagaaaaatttgacaatacagatgagcaaagagaagacaataaaacatcctagtaatctcgccacgcagagataatcaccgtgaacattcaggagtgtgcccttctagacttttctttgcggtatgtgtttgcacatatccacccccaacaaacaggaggccctgtggattttcctgccactctttcattgtgcctttcttggattgtctttctcctttgcttaaaacccttcaggctgcccgttgcatacaagttgaaaagcgaattctctaacccctgccctctttctaccctcattttccctgtgatctcctcctctcctgctcgccctccaccctcatcccattctctaatccacattctaatcccagatccctgaagcatttatactccacacctcagttgtcaacctgtcaacattctcccccagactgtcagtccttttttttcttttttgagactgagtctgactctgttgcccaggctggagtgcagtggcgtgatctcggctcactgtaacctctgccttgggggttcaagcgatttgcctgctcagcctcctgagtagctgggattacaggcatgggccaccacgcccagctattttttttttttttttgtatttttagtagagacggggttttgccatgttgcccaggctggtctcaaactcctggcctcaagcgatcctctcgtcttggcctcccaaagtgctgggattataggcggtgagccactgcactgtcagtaatttatccaaagcctggatattcttcaaggggcgatccaaattcctaactttcccctgtagctgctcagaccctcagtggctagagatggcctcttctcttttggttccccctcctgccctgcctctatcaatggtctgccgggaccatgtgtccagagctaacattatggggcacttgctgtgtgccagactttccctaatcgctttctggcatgcattgtttcaggagatcccacaaggtactgcccatgatgtggatggtattattagccccatttttctcatgaggaaatggagacacagagagcttagataacctacccaaggacccagatttgaaccagccggtctccttccatagcctgtgtgccagctagtcgcttgtcttggtgcaccccagcctgtcctgggcacgctagcggcctggcattttctagatttttcttgcaatgcttgagattttgcatttctgacacagccaggtgatggtgctggcgtggcccccagagcaggcttgggggagtggggctttcctttccagcgtccctcctttctcatggatcactcagggtcctgagacagaagcctgactcaaggtagtctgaacaaaacaaggcctccctgcctgtgtaatggggcctctaagcctcatcatcagccctggcccaaacttggtggtgtgggaaggacagtcttccaaaggaaaattcgagtgctgctcttggaggaaaggggaatgcatgccatccagacggaggagctgcatgcggggctctgggaaacaagggacatcggctagtggttgtggtcctcctcagtatctcaccaataaggaggaagtgctcagttacatgtgactgatagttgatgagcctgaagcctccaggcatcattggaaagatgtggggagagggaagaggatgggttgcctcattaacagctcccactttcccaagacttcagcttgactaattcgaaaatatttaccatgtacctgctgtgtgcctggtgcccacacctggaggtggccgaggaaactttcttaatccagggtgagggtcccagactggagcccaggaggcttggagatatcactccaggacaccttgcaaacccactagcagctcttgggccaaacacagtgcatgtaagacccttattaggccagtgctctaaaacttttggcacttagcagccacataattagatgtaaagatttctcataaaaatctggatttctaacttttcttgaaatatgggaagctctgaagacactgggcctgcctccttacatggcaacagccagatggagatgagcagtggccaccccttgtgggtaagagctgtgttccctgctgcgctctctagctcacctctccctaatgtcttaccctcggccagcctctctcagttatgctctctgcctggcccccatagcatttgagtttgcaaattttggccttactagctggccttgtggaactagacggcctctccactcaacaaatcacgacaagagcccatggatgggcacaggaaggggcaggggcattgcagaacagggaggagtctgaacaaggacttagagctctaaccaagagctcctggctgggtcaaatgaggaggaagctgttgagctttttatatgcacaaacgtttattggttgatagtgatttgtttatcattggtccttttgttggctcatgactgtcttttgagttaattccagcttcaaggcctttgcacctgctagtccctctacctccatctgcacactcctcctcttgctcctcacatggctggctcccctgtctcagaaaaagcatcagcaccatgagggcatggatatctaggcatggacgtctttgaggggaggtattactctgcctaccacactgtttatccaaccacccacacacatatgtttgtagatatttatctgtccatctgcccacccacccacccacccatcaacttacatatctatctatctatctatctatctatctatctatctatctatctatctatctatctatctatcacgtaacccttgtgttctctcctcaagaaggaagcctacttcttgattcattttcccactttaatttcagttgtcttaatgttctacagaaaatgaaatactgtagcagagattgctctatagtccttagctcacagagaatgatacagttctcttctaagtaaaatattaccttaaatgttatataacaatatatagaaaagaaaaatttaaaagattattatgttgttttatgtatttggcacaaatcatatcaatctgtgttttcatactttgcaaatcaccaataatatataatattgtttggtgtctttaaagtacacataaaagtatcatagttatttatcatttatcattcttcagcttgatttttaaggtcaacattgtgtttttgaagatctcatcgtgtcaggacatactgatcaaattcattcattctgattgctgtagagtgtctcatccatgagtaagagtttgcccttcattcatatgcttcctaatatttgttgttatcagattttttaagtgatgaatataatttataggattctatatatatcctagatttgtatgtattatttgcctgttatatatactgcaaatatgtttccaagtctattacttgtctttttaagcccctttatttatatgtacccacataattgcccatctcttgtcttttcatttgtttctgcatgtcagatcttccttctgggattattttcttctacctaaatcatattctttagaatttcctttattagagaaggaaattctcttagtttttattactctgcaaatatatttatttcatcattgttgttgaaaaatagtttgctgggtacacaattctaggttgactgttattttctcagcacatcaaagctaccattgcactatctgtcagcttccattttgtggtaaagaaagccagctgttagactactcatctgtcttttgaaagtcttttatctctggctacctttaagatcttcttttatcctttggtgttccatagttttactttgatgtatatagatgtatgttgctttttatttgttccattaggaatccacagggctattttgatttgtggattggtgtctctctgtaaaaaattcttagccatcattctccaaatattgcctctgtcctgttccctctccttcctttctgaaatactgaaataatatatattagtccttttctatctttcatgtcttttaatacttttaataaccttgtttctctgtgctataatctggatactttgttcaaatctgtctttaaaattttaccagtttttaaatctactattttttgtaaagctttattaaagtataattaaattttaataaattgcacatatttaaaacatacaattaaataaattttgacatatatatatacctgtgaaacaatataaccaggatcatgaacatatctgtcaagcccaaaagtttcctcctatccttttgtaattcctcccttctgcccgtcctgaagtccttccatccccaggtaaccgctgatgtgctttctgtcacataggatagtttgccttttctagaattttatagaaacagaatcatacaatatatgctctcttttttttgcctggctttattcactcagtattactattttgaggttcatccatgttgtgtttatcaagaacacattccttcttattgctaactagtatgccattgagtgagtatgtcacaatttgtatacatgttcacttgttgatagacatttggtttgtttcagtttggggctattacaaataaaatgactataaatattcatatgcaaacctttgtatggacatatgctttaaattatcttgggaaaatacctagaggtgaaaagcctggatcatatggtagatgtattattaacttttaaagaagctgccaaattgttttccaaagtggttgtattattttacatctccactatcagagtatgagagttccatttctctacattattgccaacacttggtatggtaattttttttagttttagtcatttgaatagttatgtagtggtatctctttatagcttgaatttgcatttccctaacaagtgatgatattcagcatctttttttgtgtgcttatttagcatttgtatatcttctctggcgaagtgtctcttcaaatcttttgcgcatcaaaaatgggttgttttcttattgagttttgagaatttttttaatatactctgattataagttccttatcggagatgtgatttgtaactattttctttcaatctatggcttatctttctattcttttagtagcatcttttaaaaagcaactgtctttcactttgatgatatttaatttacctttttttgttatgtttttagtgtcatagtttaaaaaagtgtgtctaaacagagcttcaaagcttttcttctaaatttttctctaaagttttatacttttaagttttatatttaggtctataattcattttcacttagtgtttacatatggtgtgatgtatggatcgaagttcttatttttgtgtgtggatatcttatctagttgttccagcatcatttgttgatctatttgtctatttcaatgcaaataccacactgacttgattacgccgcttgactctgagacttattataaagctaaagtattccaaagagtgtggtttttgcatcaaaatggatacaaagatcaatggagcaaaatagagaatacagaaatagaccatgctgtggtcaattgatttttcatacaggctcaaaggaaattcagcggaaaaagtatagtcttttcaacaaatggttccagacctggaaaatttctccatcaataagttgaggtgtcatcaggcttacctcatctgtttctcttctttcatggatcactgcctttattgctcaatgtccaatgccctgaacactattgttttgtatctttattcagttttttacttgggatggtaaatctggttacttttgcaaagtcttggtcagaagtccctggcctattgcagtgcctcctagttgatctcccctacttttattggtctgctaaagtttaagttcaattgttgatgtgaattatattttatttccaaaaagttttatttaattatttttttaatttgcttgatcattttatagtctcttgcacttgactcttattttcaacctttttttttttttttaaaaaaaaaaacacatctaatgttttgcatctgacaatgacaacctatgaagtcttggcacatctgactctgttttatatatttgctctcacatatgttaacttatttccttgtttgtgttaaaatttttgactgtgagttgatatttttggaactttgagatgtgggttgaaggtggattcctccaataaatatttgttttgcttccactgggtgcctgggggtgctcgtttgtttgttgttatgttccccgggcaggtggtggggtagggagtatttatttctaattcacccacatactgagagtatgcctttcagaggtctcagctttatgcaggaaaggaggttgggtcttccatgtgcctctcactgaagaacattctgggctttgagtcctgtaccctcagctgcaccagagcatgaaaataggaaggtcatcctcatctggtttggcagattcctcaaagtgaaagcaatctcacttttccagggcgcagctctcacttggtttttgcctttgaactatttcttatcttttaatcagaacatacgtaaatttaaatataagtttaaaaaatgtttacattttacgctgcatttttaattgttttcagtataaggataaatttggtggtaatcagtcagagtattgagtccactgtgctgttggaaatggagttcttattttttaaccttgataatgatggttttttcattaagaatttgtaaattttgatgtagtcaaatggggctgtcttttcatgactttttggtatatctaagaaatctttctttactctcaatttcctactttcaaaaatatgcagatatgttatcttatgttttcttcttgtatgaattcatatatatagaaggatttatttttatttttgtttataaagacaactatggaccacgggttaaatatggtttttaacttattttaaccatgagcaacgcattatttatatacatatatatttgatcgacagggtctcactatgttgcccaggctgcagggcagtggctattcacaggtgtgatcatagcacaccacagcctcacactcctggcctcagtggtcttcctgcctcagcttctggagtagctgggagtacaggcatgcaccaccatgcctggcttggtttttatatttttaaaagcttatccatataaaaacagaagaagaatacgtggcacagattgtctgtggcatacaaagtctaaaatatttattagctggacctttgcataaaaatcaagcagacccctgcattaatccacttttgcccacttacatgttaaattttagcttcccgtttatacttgaagtttttttcagggcctttcattctgctttcattcatctctatgttttttgccaactgcaaataccacactgtaatgaaaatggttgttttcattaacaaaactacatgagttaaagaagagagattagaaaatgcaggatccacttccagagtggaaatggaaaaacgcagaaaattcatactcagaagcctaattgccctgacattaactagaggcatagagatccggagcactcacaaaatacctccctgccttgcccaaagcaagcgcgggatcatggaattagattttattgattaatttataactgtgtactgtgctgtatgaagcatgaaacattcagagacttgttcctaggaagcttccaacaaatggaacaatgaattgtgaagccccaagtgaatggaaatgagcgaggagaagattgcaggttgtatgggagaagggcactctataaaaccctaaaatatacattagtcgttgaaggggagagtggagaagaaaaaaatcctgggctttgagaatgcaattctattagcagatagtgtttttccttatggagcggatgtttatctgtctaagccatgtgtctattcactttagtcatcacacaatttacttattcaatgagatagcactctcagtaatgagagcacaatctctgcagtgaggtaaagacaaagacctacagatgtggccctgagtccacgtggcctctgctgcatgtgacccccaccacatgtggctgagactctttgtcacgttggccacagccccagagctttgacagcagtcccaggtcctgcttagcaggatacagaggctctgccatccacacctccactgctcttctctttgctttgttcttctctgtggggtcaagagaggaaagtgagggaaatagcacgtcagatctcatagtttcgccccagaaaggaatgtgtgtggagtgggctgtgtacacctgcaagagccactccttgggtctactgtccttccctgagagagcctgacaaaggtggcaagggggtgacgagtgtatcaccctcacagccgggtgcggaggtgcagcctgacgaaagtgtcctggatggggccccaacagcactggccacaccttgaggggacttgcatggctggtgatggagatgagcttgcaaaaccttcctaagccaggatgctgcttctccaggaggggctgcacacagaacgttttgggagaaccaggagagagagaaacgtaccctgcccatgactaaactaaacagtcctttgaagacattgccaaggtccacttgggctgttctcgaaggcaaaaagtttgaaattccaccttgatgaagtgcgaattcagaggcggggcctttcctagctctctccttgttattttgcgtgaggagaaagacccccgcttgctaattttctgaaagtaaaacctccctgcagttcaaactgtgccgttcttaacacctgcaagtgtgtggcagccacccactgacttgcgcaaaggtgacccagcagcaggtggaagaagaattctctccatgtgccaccccttccttcctccctttgtctctgcactttgaaatctctctccacccaggccctgcaggatttggttcaggggtttgtcgctccccaccctggctcagatagctctttcaggaacctgtgttcttgacaactgcttcaaagaacaaaccagccaccactgcctcccccaccaaactaacctcccctccccccagccggggaatgacagctcctgccccagacaggggaggcaatcatgcccagttgaggggagcttctcccaaacacagaggccggaaaagatgaacaaaatgtcactttctcattgttgctgccaggaaaaaccagtgcccaagaggatactgcattctgtagatcttatttaaaattttgtgagcggccctggtgattaggggactgcggctggatcttggcggtggctcagataaatgagaaaggaaaatagccggttctgaggagcactgtggagtagaaatattgtaaactgaggcttgtaaagggaagggattacttgtggcttgaccaggcagttagaagcagtgcaaagatcttctaaaagagcttaaggcatattgcaggcctggctcttcgtctcattcttttgcctatataatgggggtgctatactaggttgatggcctgtttgtggttgcacattcctattagtaaaataatttgtagcctgcacctattaaatgtgtatttgttcatttacaaattatacatatattctgctctatgacatgaaacaatagaaacaagaaaggacatgaaacaatagaaataagaaagactagatgaaaataaatgtaaatagaagctctagtgtttttctttctctactgtcatcatgccttccctctgagatgtaaatacttcgtgttgaagacaaataaatcagatgatctggtagggctcctccagatggaaggtctatgaagaatgttgtccaatatggtggtcacaaataagaaagactagatgaaaataaatataaatagaagctctagtgtttttctttctctaccctcatcacatccctctgagatgtgaatactttgttttgaagacaaatacatcttatttgaagaaaatttatttgaagacaaataaatcagatgatccagtagggctcctccagatggaaggtctatgaagaatgctgtccagtacagtggtcactagccacacgtggctatttaaattcattaaagtgaaatacaatttaagactcagtttctcagacacactaactacatttcaaatgcacaatagctacatgggcctaatggctgctgtatttgtcaatgcagattacagaacatttccatcattgaagaataaactgttggacagtctgtgaagcaagtagtcaagaccacgtagcttaaaacctaattgcagcaactatccttgactaagcccttgctatgactaagcatcctgggaagcattttgtgaccacctcatttagttcctacaacaacctctgaagctaggcgcattatcctggggaggtgggggatgaggtatggagggatcaggagttgctcagagctgaccagctagttagaggttgagccccgtgttctcctgggcaccccacagtgactttccagatttttccaggcatgtgctctccaggctggttactgcaagcatgcttctctcttctacaggtacaaagggaatttcttgcagagctgtgttcagctgagagccagtagacttcgcacaccaacctgggtgcgaagaagaagccgccaccctcccgcacttgagggactgaagccatgcaggacccctgggcagacctcttcagaaatagcaggtaatgctctctttggaggtgcatccagactgggcactcgaaggcacccgcccaaggcatagacactggggatttgggatgggcaggagtcagccccaagtgccacaggggtcaggcccaaaagggagagtaacagaggcatgacgtctatgagacaatcaaagtgaccctaaactagtggggagggcatgtggtagaagacggagaattcaatattgagaagtcaccaatatccttgagtactggccacctgtgccaagctctgaaccaggtgcaggttccctccaggacccaggagaacatgaatcacagctcttggtgcctctagtttcactatttctaaaaagaaagctcactcagttctctctgcagggtcattgtaaagctaaagtgggtctgtggatgggcttaagagcccatgtgaaatagaaagatgagtagttatgtgaggctgcagggtacattgcttacatgtgaagtggtaagaggcacactcttcaccatgcttggaaataaataaaaggcgaactaagtggggctgcttcctggaaaaatggctattttaagctgcaatcactgggcaaccggggcaaatggctcaacttctctggatctcaatttcctcttcctttctcccctctccccagcattaaggagctcagccttagccttgcttgattgttgattgggaaaaatgaataccctgtgggaaatgctgcagggtcccatctggccagcagtgcctgaattaccatccttctgtggttcattgttgtctgtttggctcaagagctaacccttggctctgtctcatgcctgaggtctttggccctgggggatcctttgctggggcaactctgcctccacctttgtgtagctccagtgccccctacaggcagatggcacttgagtgctctccccacacctctgctccccaacccccagagccttccagggtaggcaaggacatggagtagtcttgtttcccagagagaatttaaatccaggcaagaattcatcttacagttggggccagttgttgaagaagaaaggttgtttttgttaaggaaggtcaagggtcaagccccatgtgggagaggctgggatgcagggggttgggtaggtggaaattccatcaagaagctggctctgagctctcttcctcatctgtggctctcaacctcacctccatctccctcctctgtatccagcgaaattgcccattgggctgtgcttgatactgccacgccccatggagggcatctcagggctaaatgctggtctgtaccaccaggacaagaggatgtctcccccatgcaaaggccaggggaccatgcaactctctgctttctcgttgggccgtcctgtgacaggcacaggtgccatcgatatcacctctgtgctctccaggtgccctgtggatgcccctcgtctctccttaagagttttccaatgtataacccacagctgggaatccaggtccagcccagcaccctctgaagtgccaactcagggtacctgggaattgtgcacagaattgtgtgtgtgtgggtgacttccagaggcatgggaactccaagtacgaagtgagcctcgggggtcatggtacttgctggctgactcctcgttccctgttcccatggactcttccctcacttttgcccccatcagctccagttcttgaattttcctttatggggtagagcttggatggaacccctgctgagacgctggcagagagctggtagcccccgctacctgggaggttctgatggtcactggtggaatccaacagaatcagccagagctctgccagttgcccccatggaggagcttaccaccagctctcttcccagcaccttaaggacagccaaatggagctgctcctggaactccccgtcagcctccctgcttagctccccaggcactggactcggcactgtgacagggaggggaactaaggtgacccctggtctcgataaatgtggtacaggacaaagacagacagactgacccactgtccaccccttagctcagatgccaccgggaacgacattggcagatctgtttgcttccccgggacatctcgtgtctgtctgtctaggatgtcgacggtctgtcagtgtgagattcaaggtgcagcaatgccttgcagactccagcatggatgaccaagtatcatcatatgctcagcattataaacacatgtgcatgacagttagcacatactgagtgcccatgagtgtgcatgtgggtaatgagtgttttcttgttgttcagcagaggacgaggtcatctcattagtgttgggggaggaagacaaaaaggaggctctttctggaaagatgggggttcttttggaaatctggatgtagggagaacagacagagactttctggactggggattgagtggataaagtctcagggtcaagaagagggaacatggggagttcagatagagtgtaggtgggctgggcacatgctgggcccccagaagatgtgggacagccattgatgacagtgtctccacttgggtgtcacctgtatcagtttcctagggttgttgtaagaaattgccacaaaggtggtggctttgaacagtaaaactggattctctcccagttttggaggccaagagaggctgatgctccctctggactttctaggggtgatccttcctggcctcttttggcttctggggcctccagctatttcctgctatttccttggtttgttgcctcatctacgtcttgtggcctctgcctacatcttcatgtggacttctccctgtgtcactgtgggtcatatcttcttctgtctttctcttataaagacacttgtctttggatttaggagcctcactaaacgtgggcttatctcatttcaagatccttaatttgattactgcttctgagaccctttttctaactcaggtcatacccatccacaggttccatggactaggacctcagggccactattcaaccatccttacaggttttatcctatctgtgaaccaacagaagtggccttaaaatgtgtttgtaaacaaaaaaggcagggacacacacggacactcagtgcacaataatgcacatcatctgggctctcattgtttgtaaatcatttttgcaggaaagttctattataaacctaatacaattaaaacagaattgccccggccactgccagcaggacatgctccacacttgggggaacagttgtccaagtgaccacgggtagcctcgatgctgatagctatggggcccactggcttcccttcaggaagaaagcccagtggccggcgggatggggctccgcggagccgccatatgtgaggattgtgtttgttggagctgaaatccgtctgtggcctgacttgtctggctcacacgctggccctgagcatgaggctgtgtcagctgcagcagggacacctgctcctctctccccctccacaggggacacagttcccaacgtgttccatggaagttggcacccctgcctcatctgcagcttatcctgcatgctcatggtgaccctgggggcctcagtgagcagagagcccagaatgaaaagccctttcaccccttcttcccttcagcctcagggaagggtcctgcacgctcaccccatggactaatggaggagtcccagagatcctgagctccctccatgtgggggaaatcccacttccataaacatcctgtttcaacatcagcatttcattgctttcttcacacctaaatcccaagagcaaactgggggcaccaatgaatggtgaataaaaccaaatccccccgtctctactaaaaatacaaaaaattagccgggcgcggtggcgggcgcctgtagtcccagctactcgggaggctgaggcaggagaatggcgtgaacccgggaggcggagcttgcagtgagccgagattgcgccactgcagtccgcagtccggcctgggcgacagagcgagactccgtctcaaaaaaaaagaaaaaaaaaaaaaaaacaaatccaaggagaaaaaaaaattcagaaacaaaacctgaatatagatctaagaaacaagtggctttccatagctcagattcctgctgggaacacagctccaccaccccatccccttacataggtaataaggccccagcaacagcctggaatggtgacaaatatctatgctttcatgtttgttatttgagcatccagttgaaccaggggcctaggtccctggctcccattttcaaaggccctcctctccagcaattaggaaggacatggagaatgtccactgcagggcagctgtgagctgcaggatgtggtagaagccctagcccagagaatatcaatcactgcctgctccttattgaagtgtcagagagggaaccgggaaggctagtagggcaaaccagcaagctggggttgacagatcatgatggacaccatggagttggagggtggaagaatgctttaaaataaataccactggaaatcaaaggggcacaggggttttattaccagcacttgccaataccaatatttcacagtagagtgacaggcactctgagggcactgggtgtttgaagacaaagcactgtcacttcaaaggaacccagagttgagcctggcggtccaccacttataaacaactttctcgggtctcctttgacctggcgcgtcctggatggagagatcagagctgcgtcctcggtgagggagctgaccttgtgtgtgtgtgtgtgtgtgtgtgtgtgtttgctcgtgagtgtgcctgtgtttttttctttctgaggagagatgacctgttttccatggcaggacaatgatggggtaatctgttttgggtgacccaaagggctgtaacttggggaaacttggtagaatccaacaaagaaattgagaatgacctttgtgtaggtggaggtgggtgggatttctcaatttaaaggcagagaaaaactttagatactaatccttttaggccagctagaatcagcaaaacattcagaaataagaagtcatgaatacttgtgtccagggactgaaataagatgtgataactgataattttgtcttctttattttttggagacacttcctgtcaataacttgggaggatgatggagagagagttttttaaaaaaatatttttaaaaaagatgtttaatttccctctctcctaaactattccaaaagcatggttctaatcatttgaattaacagatggcttggcagtgaagtcatctgtaagcagaaggccagaggagttatgaaggataaagacctaccgtgtaagattgtacatcgattggagtctgtgagactgcccggacaactgagtcttttttccctaatcctaaatccggtagtccattccatccaagtttccagctagtgggtgcaggaaacttgaaatttctttttaaatatcaactaaggtgtatttcccaggcaccccaggctgagtgtgactaagaatggacagaagttttgccgttttaaagaacatccttcctcattgcatttgctttaggatcagggctgaggggtgcacttaatctcatagactggggctgtctcattgaagggattggtaagaaagttcttagatatcaagtcattgatgtaccagggaaaacaggcatctaccttataatccagatgttctttatggagcactccagtcataaggttggctggttaggtgggaacatgagaactttccctaatagactgactgctggtaaatttagaccccattcaattctctctctccttgcctaccatcacatccatccatgcccttcagattaattttcgcaatatcatggaaattgattgctaagtgaaattgcaaattgtgctcaagatgttgcattttgtgaaactgatagaaaagaccattggcagcctgctgattcacacccattggcagaatcagactaggtgacaaatgaacaagagaaaagtgacaaagatgataactctaggagagtgacttgaatatcagaggcttaagagaagtctttggaaagattgataaagctctataatatttttttgggggtgggagtccttcttgatgacctagcaattaaagtaaatgcgaggtaaatagtccattggtctaccctacaattttatgtaaaaatgtatgtcctcatcaatacttgactacgttttgttgatttttaacaattagctcatagtttgccattataacctccaaaatggaggtttatttttattttatcgttgtgggcatattagcttattttcacaacttttggttttgtcgtttttccagataaattctcaaagtccttaatactattcactgtgaaattgtggtattgcgaattaattgtgaatgaattcattttaggtggcctttcccctgtagcaatgatctcaactaaagaagaccttgtttaccaagctgctaggtcatctcctccatgtttgcatccaggggcctagcaatgtagccggtcctcaataaagtttgttgaatgaacaatttaacaaacataagtttctttaccttgaggttcctgaagcttagtttcaggtgaaagcaccagcaaagaccagcccccaaatctttgagcatgaacaagagcgagcatgccacttggagtcttggtttctgattgtgcgttgtgtcaaaaatggaaaaatccagtgggttaccagtgggatggcagtggagtaaccgcaaaattcaactctatggaatcaccattttcaaccttaggggtcatcttatgtcacctccgttttatggatggaagctctggggaggtaaaagtagtaaccgaactgcgaatgtcctttccatgccttttaacctgacgtcctctctctcccacactacagtggggccatgttgtaaaggctggtgaggtttgtttccaaagctggcccccaaggcacaatccctattgtcaaaattatctttgagaatcctgcaaatctatcataagggtacgatttgtttatacaactctgaacagaaattctcgtgcacaatatgcgtgaggactgctgagatgaaagaaggaaagaaaaaaggccatccatccatgcaggcagctttgaagataaacagcaaatcctcccactgaagagaggttagaaaaattcccacgtgtccctgcttcactgcatggtgtgtgccatttggttttagcattaagcctctaaaactgctgtgacatcttaatggattgagttgttatggtgaggattaagcaagatagtggagttgtgtcttcttgggtcagggaagggtgagcttcaacagtcagggtgtaggttaaatgcatgtgtgatgggactgtgctgccgtttcatttctcacttggaatgcctttcttactctagcataggaactggggggcagttttccactggacagctactccatgtcatcttgagtcagctggtgccactcagtcaaagaccgtcccttctagcccaaggagaaattcacagcaaatcatgtcttgaaaatgctcttcccactattttcccagttagagtctcacttaggaagacaagcttcgcatgtatgtgtgtgtgtctgcacatgtgctcacatgctcttgtgtcagttttccattagaaaaagcaattgaaaattacacatccatatgaagggtgatgccacctaagcaaaagctgccgaagattctctgttgtggttacacaatttctgatgaggtcactgatctgaaatgattattattcagaatgtagggaggtagggggatgaaggcaacgtcattgattttgtttgtatttcaactgggacatcctgttctctgtgatcctaatgcccatcaacatacagccttattatcattctcctaatatgacagttattgacccttgggctgcaaaaaataatctcataaatagattttccctgtttttatatttatctgcacatctctttctagccgatgacatatcagctttgtaaaaaattattattattgaaaacctctgtgctaaaagttccattaactgagacctgttctatttactcgaatgcttgggtacattaaaacattccgtggtataaagagtgctcttatatatttccttagaaacacattttgcggaactgaatggagaacattgatgtggttgaggttaattatttgggcttttgctgggcacattggaagtcgtgccgcttctcctggtacacagactaaaattggaacagtgaagaggagctgagcatggccctgtgcccagatgacacatctgaagtcttattgattgagggagatgttttattgaacgataagaactacattgagtttatggttttgcaatttcctgcagctggcatggtttataacagtaaacacagcaaggttcagggctatatttccaatggagattttagaaaactctctcaataactaaactcaggaggcactttcgatttaggaagctcatatgcatttattcccttggacacacttgtgatgagtgacttttatcctcttttggcagatggagaaactgaggcttagagagttgtccagtgacttgcccagaggcacccagatgattgatctggggatcagcactgaggcctaaattgaaatcatctaggtgccaccttcagaacttttgttgcatctacatgtcacctatgtgattctttacttattttttctcctaggtgcacttacaaaaaaacttaagtccaattatttcaagagaagctgtttatcgatactgaaaatgaaaagttaatattatgtgccattaagggaacatggcaaaaatataaaccctacaatgtttttggtaaataagttctagccagaatctgttgtgagctgaagtccatgagccctaggaataccccttctgctaaaaagagatttggaagtgttagggaagcattcaagatgcattagcacctagtcgagactttcttctctccttaatcagaagattaaaagagaatagaagagagaacagcttcatcattgtgcaattcagttttatttaactttttgcttatcaatcacctaaaataaccaccaacccccacacccttccctgggcccctctcttggagagccataccccctttttttctgtcagtaggatcctcattggcttgcattgtctcatctagaattttctcaatttttgtaaggctttgacctgtatggatttaaaccactgaaccaattcagcagaattgactgcagaggccatgggcaacattctgcaaagaccctcctggaagagccttcccttctctgcttcactgggctagggtgagaggcacttgccaagagtttcggaggcagcctgaatccctgcatttcttattgattgattgactgagatggagtttcactctgtcgcccaggctggagtgcagtggcgtgatctcggctcactgcaacctctggctcccggaaaccctgcatttctaagattctgggacactgattgggagcccatggtgggcatgctgcctgtgccaggaggaagtggtacacacatgatagagagatggccagtgtgccagggtgagtgggggacaggcacatgtgcagtgggggctcacaggatggaatgcgtgatagacagatggctagtgtgccaggtgcatgggggacgggcgcaggtacagtggaggctcacaggacagggcatcacctgcaggacttctcaggcctcagtcggggcctgaaatttttttcctgagaacaacaggattatgcagataatcccatttaggttttctaaagatcactctagacacagagtggagcaagaattggggtaaatagagtgggtatgaggtgactgattagaagaccactgacaggtggggcacttttgttcttaaaaaaaaaaaacttggcaaaagtgatgctccacctagaggggcaaaaaagttaattattagtttttaattacacgtgtaatcatgaataatacttaacacataaaaatgcaatagataaggctgatgttcagtttcaccactaccccatcccaataccatcctcaggtaaaatgacagtttggagtctggagtacatctgacagatcttcatctctgtgtgtgtgtgtgtgtgtgtgtgtgtgtgtgtaacacagcagcagcacactgcacatctcattgcacaacttgctctttttactcaaaaatgttttgtggttccacactgtgaaaacatgtagctctgtctcaacttcctgagcagggacagagtccctctgggtgggaatactcttatttatgaagccattctcctattaacgaagagtttggtcatcaccagtgtttcacacttgcatcatgctccttggacacactgtttatatctccttagcccaggcagggtttgctctagggaataaccaagaagagaaattgctgggtctttgagtgttgtgttgcacatttttaatagccattttcaaattgcttcccagtttatacccctaccagtagcatattaaatacctctcttttcctccagtttataaaactttttcttcttttccccttggatgagtaaaagatgctaccttctatgcctgtggatgggagggcctttccagccctccttgattctcactaggggtctgttatccattctgtccgtggaaggctggcattctctagtagaaaaaaagaacatggagggacgataagactcgtttatttatttatttatttttttaaatcacagagaagtaagtttctcttgaccagatgttatgtccactgggcacaatttgatattctcaccaaatattaatagatgtgttcctcagcagaggcacgatggatcagcctgctctggggggactctgtcactgcaaaggacatcaaggccttcctctgtgcccagccaattcattagacccagttagcaatttgcaaaagagatgagttgatctgcaggctgccaagccccagtgttactcagctacctcccagaaagctcagagaagccctggcctcccaggagcctgagagagcaaatagtaatatgtgaggctttaggcagaggctgagcagagtcatcattcctcattataaacagaagccagagagatgaatttctcagcccttcctgggttagggtgggatttggggccatagtccagactcccgggataaaatgagaaggctcacaaagctggggctcccaatatgagagcagtgtttcttttttcaagcttttattattcccaaacagattccctggttatcttattttgaaatgttgctactggaggcagaactttaaactctgcatgcctgtattaggagggactctttgaggtgtgaggaaaagaggcttgattcaaattggcttagacaaacaaacagaacccaattcattatctcacagaacagagagaattgcttcaagctcagctgggttcagaggctctgcaggtgggtgtgttcgtctctctccatctctgggcagctctggtcctgcccagctgttccatgcttgtgttagcgtgactgttttttttttttatatatataactgagtccctaaactcaatctaactggcctggtttggtcatgtggctgtccttgaccctgtcactggggatgttgagcggccaggtatgggtcctgcacctgtccatgtactgagggttgggttggggccatctttttgctacagccattaagaggaggccaaggagggcagatcacctgtggtcacgagttcaagaccagcctgggcaacatggtgaaaccccctctctactaaaaatataaaaattagccgggtgtagtggcatgcacctgtagtcccagctacttgggaggctgaggtaagaaaattgcttgaacccaggaggtggaggttgcagtgagccaagatcgcgctactacactccagcctaggtgacagagtgagactctgtctcaaaataaaaaatacaaaataaaaagagtaaatgagagatggttccccctaaagaagtgggggtcaggcaagtaatcacagcagatgtcccctcttcctccatgcagacatggggaaaccatcttactcatggcttaatgcaattaggtatgcatttgtgagccactgagtgtcttttgaagccccatgagaggagaggaacagaagatggcttgagccctcacctcaaggaggttaggaaccggttggtggaccaagacacctttgtgagacagatgagagtcacgtggcctgagggtcccaggtaattactggggcctgttctgtgccaggcaatgtgtgggagcaggaagagaggcaaacaagaacatgacatggcccttgtccttagggagagcccagtgtggcaaggggagccggcacagactggtaaacaagtcattacaaatgcagtgcggtgagctcgctgatatgattaagcttccaaatgagggatcctgacaaggcctgctggagcggagaggggagagtgtgctagcataaacaggagcatagcagggggtggggcatgcttccgacgctcaccccaaaggcttctccattcggccccccactgcagaaaggaatgtcagcagggcatgtgggagaaccgaaggccgtcactctttatcatgccttctttcatccctcgatcataaagaatttttgccatatactctaaactgctgggaatggagcacttaactactatgtacttatttatctaaaatgctaagtgtttcccttagcaatcactaatagattcctgtagaaacggagtgccatgattagaattctgatgtctgtgccgacagaaggtgggaaggcaacaataggtagtgcactaatgatgggttcagtgggcaggtgggtgggtaggacgatatagtcattgaaggagaaggttgaaatatgggcattttaaagataaatatgtgtttatgttaaaagttgagagagagaaaagaggagagggagggagagaaactctcataccttcaatcccacacctgaaatggggacggttctgcttttgaaagactttctgaaaaccgttctcatatttgagttggaagacccccttctcagcagagggccacaaatgaatcctgagttttgttctggaattttcctatgcaacgtgctggaaccagtagccaaatagaatcagtggatgaggcaggaagaaaaatgaggatctcagggatggaactcaacaggctacaaatgggacacaaaaggcaagactcactctcaacaaaatcacggaggcaccaggtgcgccttgcggggtctgtttccccgacacccacctgctgcctggtcttcacaaggggccaggcccttttggtttggaggcagatgagcctgtaggattaattctaactaaggtgtgagtggaacctaggggagaagtaactttaggggctacagagagaaaccttcagtgacactgactcataatgggaaggtgattctcctctcaactccctctccagcctcttgatcatgccatggagaaagtcttgttttgattccatctttaacacttgcctaaaccccttcctaacctcccttttaatcagagagaaagaggttaggtctcaacatctagctagaatttgagaacacaattctgtttttattgttttttttaaagaagaatctgctccttctgatgccagacactccaaagtctcctcaaccaccttactccattaaccttggaaagcctaacgtttccctttctctctcagcctcctttgaggccaaggctggtacaggataaataattttgctttctggatttagaggaattggtttgagtcttgacttttactagttctttgggcaaaatttgttccttctcattgtctcaggtcctcatctgtagaatggggctggagtttctgagtccataattcatttaatctggtgcccaagaaccccatgaagcctgtccaggaatacctgactcatttgcccttgagattgaggagaggctcaagttacatgagacagtgactgtgaaagtgctgtgtgaactacaaaggactttacagtgtgtggttatcatggctgggaggtggcaggggtgagcatacactgaattttccccccaggtctggacaagacgtcttcaagccaaaggagggaggcagtgaatggtgcaggtccatactttccccagcagggagctcgtagggattcgggagtacattctgggcccttgagtttgtgctacatgcatgcctatggtgctcttcctgccggggtgagacttgccctccaggttgagaaaatgacgaaactggaataatcctccaagctccaactcgtcccagaggcctccctggcaatactgtgctcttgtagggaccccatcgtcctctaggtaaatagttcacactggccctcaccccactgctggctgctggcagggagcatggggaatctgctccaaaaacaaccattgcttcctgcagtagcattttgagagtttcctccaaatgtttttcctcatctaattttcagtatggccccgtggggtcaggaggtgatgtgtggccagccctgtcctaattaggagtcttgcccaagttcatacgttgaggaaaagaaatgcaagctcagttccaaggtttttcccttgctaaaactcttaaaattttggcttgcttatttccttaacttccaaaggacatgaacaagtgatttttgtaccaccctccacatagacattagcgatcattttcagtcattttcagctttccggttttgctaggaggcacctggcgtgccgggaacggacaaaagccatttttctaagtactagcgtttgaaattattaagtgttcgttaagcacccccgggtgcaaagcactctcagagatgtttatttctcaattttccataatttccttattttttttcccctacctaaaggcagattgaaaaatgaactcagtgcattggagtctgaatcatagttaatgtgcgacgccccctcccttaactgcgctgttttctttctgcctcctcctgtctcccagcttatcaatctgataaagttctttttaacccctactcaggggctgtaacttttgctttattcccacgggcatggcaggaagcgatcaacgcagagccccgaaccccactcgccccacgggctgggctgagctgggctgggggtcgagctcagcgaagcctcgggaaggctgcagggtgcccgggcgggcggcggggtgggtgcggacccctggctgggcgctcccgagacccccctaccctggtgggtgggcgcccgggggcctggagagccgcctagccacgtggatgcttctggaagaacacaaagcccgggccccctccgcccccgccggcgccaagcctcaatcttgcaggagcagagaagaaaggctctgtttttctctctctctttttttttttttgtgtgacaacaacctcacataacctcaaaagttacccatgaatttaccaaaactttttatgaaactattttaacctctggtgggggttaaaaaacaagccttgtgaatttattacccggaagaaagcgcagagggctgggatttacagcaaagccgccttccaagctccgcgggggccccctagcgcccatcgcgggcaccgccgaagcccggctccctcctcgctccgcggcgcagcacggcctggagtccggtctgggagggaggcgggcggaccccagactcgtgcaatcaggggcacctgctctgaacaccagggacctggcggtacaaatttattttatgttcgtaggggtttccgtggtagaaccaagggagcaggctgaagccgaaggaagggagagcagggttttgatcctagttccttggcttctgcaaatcggctgggaccccccgctgagcaagcgactgtcgtcacggcccccgcaccagacgaccccagcctgtggatgatgtttcactgccctcacataaacgccacccagaaatgcaagagtaagaatgttcacgaagaggggaggcaggagccccagctgataacaggaggaggcaggaagggggccttggaggaggtcagaggggggacattatttcagtttcccaggaccagggtgagagatgggggtgaaagaagaaaaaggacaaaacgaggtgccgaaggctctattgggtgctctctgtccgcagggatgtaaagcagaatccaggattctgccgcaaaatgcaggctcccaatcgctgcacggtgaccaggactcccggacccttcgcttgccaagtgtgtgcgatggttccttcctctccagcttgcagacacactggttctctttcagaactagccatgttttttaaaagcacatggaaaaatgttaataagcaaacgttttaacagagagatgcaggaggaacgagccggcagcagcctcccagcagaggcagcggtgctccagcggctacgggaacgggcctcggaggaaagcactcgggctcgctgccgagtttcaccacctgtagtcatgtcatcctagggacgtgtctcagctcttctgtgcctcggtttccccatctgtaaaatgggggtgatagtaacactacacaaaatatatctagaatttgaaagagtgctttgaatcatataaccttggctgttgtgtggtgaggccagctggctggtattcatctagctctacggggaaggcagaacccagatttcacgttaaataaaatctctcaatttttacagggtgctaatttaaacacacatacacgcacggacgtgcacttgcacacataccccatctgggcccaaatacagtcagctagtttgagacctttacttcaaaggctgccaggaggccacgggacaggagggaggaaggaaggagtcatctctccctgtcatccaccacccccacatccaggccactggagccaaacactgaaaccggtgtggccagcgctcttttgggggtggatggattacggggaaacacgtccttcttttccgttccccctgggagaatatagcagggcacccactttgagtaccctcgcaccaggaggccttcagaagccaccttggaaatgtgatggtgcgtggcgggtggggggacttcctcttgttcctggagacctgcttcccctcccaacaagtgcgtgctctgcacgcccggcttctcaccagcccaggtacctcgccgcctgggtgctttgaggtgcccatgggcttctcatccgtggtttggtagcatcctcttccaagctgacttctcatgtattccaggaggccaacactctcctgcaccctagggcagaagagcactgggtgggggggcgcctcttctgcctcgtcccatcccagccttcttttgttccctcctgatggcttaccctgatgccctgatcatctgatatactctaattgccccattgccttgacgaatccgactgttctttgcacttcatccagccctgctagcttcactccttcaagcatccatgcattcagtagctgtttgctgggcaactgctaggcattagacattgtttcttgagaggcaaatcaggcacattcctctgactttcgattgtttcttaaaatgttgaggttttacagttgaacagagaaggtttaatagtcgttcaatctaatcgagaaagcaacaacaggaattacttgctacagtgattccaaaagggcagcccagagagaatactgagaaccaaagacatgtattctcattcatctttgtccaaacaaattaaatatgttattgatttttaaaagtccctgcatgaatggttgaaaagtaattggttttgtatgttttaatatgaaaacaatatttttaaaaattgcttcctggatttgtagggtttttaaattttgtgatttttttttttcctttttcattctgtagagtagaatactgcatgcttttaactggtgggggaaaagctctttattagtcttttcattagtctatatctgttgtgttccattgtgtttaatttcaattaatctggattcatttaagtaatattccattataggttcaatgcatgtatattttttttaacttaagaaatggggaacattttttggtcaattttaagtaactctgcattaaagctaagaaaacccacttaacgtggtttactctggaagtctccttgaagaagaagttgttcttttttattttgttaggttttgtgtttacctttcccaatctcgccttggattttccacggctggtttagcaagacttgctttggtcctgacagctcaagtctttcagtgcttctgaggacgcagggcatatttcttctttgcttccagtttcactactcaataaatttgtggagtcaccaagcagtcatctgtgtagtttgataaggcagaaaatgatgatttctctattattttgcttagaaggatgagaaactagattaatcaacgtctgttggaaatgcctctttatagaaaagactggcttctttcatcagagtcatgatctgtggctcatatgcagacacattagatggttttccaggggacaggagcagacgatcaaactctgaattttaagtctgtcattagatgacgtgaggtaaactttagtcaacctttattatggttaggagggtggtgggggccagcaggcctccatggagttcacccatctcattctctggggcatcagggaaatcgtgcaatgtctgtaagagttaggagaatggtgtgggttaccattcttggtagaaagagactaaaacccagctcaaaaaggtttaagcacaaaagggaatttgtttgctcatgtgatgaaagagcccagggtagctccagctggatccagggatgtaaacaatgtgaccaggtctctgttgatccctcttcaaatcagagtagacgttcctttgggttgccttcatccctaggcacatggtggcctcatggccctggcttatattatacctactttctgttcaaaatcccatcatcagtgtgggtcttatgcctggccccgaaccttctacttggccaggtgggtggaatatgctcactccaagagatgaaaaggagtggtcataagtcacccagcttatattgaggagggatgttctctaaaggagaactgaggtggggcatggctgctgaacacacagcacagatgtcgatcacaacctgacctgcttcctaatgggtagaggtgctcagtgagttgcttggccagcaagctgccttctccatgttttgtgctacaagtgatgttggtagtggatgctgttggtgtcctgtctagaacccctctccaccaggccaggcctccacccattcccatctttttcttacccctccctgcttcccttattccctccacatttttcttgagagtacccctttaataaagcactttcacaagagcccaagttatatgtaaatcatgaaatgcagctctttctcgttcatgcccgatataaggctatcacctattttctcaacacaaagactgaaaattttggggccaacccgaaatatataaagatgtagaagaaaaaggcaaatttctactgtagtttattaatctagttgcctctgtccctttaaatcatgtgttacataaaatcttagtttggggacattatgttttctgctcacattttgcaaagcaattctagctgaacttgtagcatgcatctttgataatgtctttgtcatcatcaccagagccacttgtttgagtcatctaatggagttttcagagcgtagcatttcactttcatcccagctctttgagatttagtccttttagaatccaagtacaatgtcataatagaaatctatccatagccataagcacccattcacctgacattaggacagtcactttcatttctcccgtaggtgcctatttgcaatttccagcaaataaacatgttctcttttactttttaaatcagtctttaagagacttgtttacaatagcatccagtgctcgcttataattgtatcccaaatgctcaagaataatgactaaatttgtgttaaaggttccccttccgtcacctttttctaaaccaattttctcagatgatgtctataagtgacccagaccagcactgaatggcgtcatttcaggctaatgtatcttcccaaacagtattatgtaattcaaaatgaagtaattgagagagttctctgtaaaatgggagcctttgtatgaatttgatttttaagggaactattttctgagataaattttggaggaaaaatctcttacactgagacatatctgctccttagtgtcataggtgctctgagatctcattagagggattgaaatgggaccaactccacttgcttgactcagatgtaacatttggaaagtaaaataacatttggctggatatggagaaatgccttctttattttaatacaaacagaagtagaaaaagacctagtatctaattggaggatccagtcatacagggatatttgggagcaactctatcttctcatgcattattttaaacaagcatttgttttaactttcattgttttgaataccctcaaacttcagttatattgattcctcatccatattataattggtttccattgtcttatattatgtaataagaatagtagtaggaatagtcttagctaacaccatcataaacacctcagtggggtttatgtttctgatggatcagtcactattatgggcccattttttttctctttttgaaaaaaatacaagcgccataatgatagtcactttaaagatgaaaaaacatgcatagagaagttaagtgactttactggaggttacaggaaaagcaagagctatgaatctaggaagtttgactccagacccttgttaggaaacactgggctttccatttcaaccacataggttatagtgataattgcaaataaatattcagaaaaaattttcataaaaatatgcatattaatcatcataaatatataacatatgcatgttatatatcaaagggaccataggcatatttgtaacacagcagtatctgctttctatcaaatgtatgtttacctgtgatgtaagttagatattgttgtgtagcaaaccacgctaaaactcagtgtctcgtggcaacatgtgtttattactgctcatggatctctgagtcacctaggtattggctggtttgagccaggctcagctgatcttgctgggtttgctcattcatctgtggagccagctgggggaaatgctggcaggttgatgggaaattggctggtctaggatggcctcactcacagacatggaagttagttggctgctgacagccaactaacttccatgctgccaaccaacttccatgctgccaaccaacttccatgctgccaaccaacttccatacttgtgagtgatgccattctagaccagccagtgggtgtagaagaccagccaatgggaacatcctaggcctagtgaggccatcctagaccagccaacgggggtgaaagaactttatgtcttccatcctcccacgaaggctgggcatggtgacagagagaggagagagagagggcaagcgagtgagcacagcagcacaaagggctctttaaaaagtgatatatattagttgcacattttttgcagtccatgtgatattttgatacctgcatacaatgtgtaatgaccaagtcagggaaattgggatttccatcacctcaaatgtttatcttttctttgtgttgggaacattataaatcttctagctattttgaaatatacagtaaattgtcatgtaatttgaatttcattactgtactatcaaatactagattttattctttctgactatattttttgtacgccttcacaagtttttctttatctgcccctctccttcccttcccagcctctgttaaccaccattctactctctacctctgtgagatctacttctttagtctcacgtgagtgagaacatgtgatgtttttctttctgtgcctgacttatttcacttaacataatgacctccagttctatccatgtggctgcaaatgatagaattgtattcctttttaatggctgaataatattccattgtgtatacataccacattttctttatccattcatccaggtatgggctcttaggttgattccacatcttggctgttgtgaatagcgtggcagtaaacatgggagtgcaactatctctttggtataatgatttcccttcttttggctaaacacctagcagtgcaaggcccttgagacctagattgggaactggcatggcatcacctctgttgcattctgctggccaaggagagtcacaagaccagctgagatctgaggcatgggaaaatcagccccacctcctgatggtcctgatgggagaccctgaaaatcacattgcatagggcatgaatacggggagtggtgaagaatggaagctctttttccccaagcagtcaaccataccttctactttaggcatgtgtagcaatttagaacacatttgctagaaacttttaataaacaagtgatttatttttccatataacaaggcgtctgggtataggtggtctggttactatagctggtccaggatattaccattgacctaggacctttctctgttcctgccccacccacccctactcttttcatttaattttttgggtggcatgatcgcagcagcagggtgaggcaccatgcttgtgtttcaggcaggggggaaggaaagaacctgaagccctaaggggtatgcctttcaaaagctctctggagggcttccagcaattcctctgtacagctcattgtctagaactgggtcacaagactagcctggctttggggaatgctggagaaagaatattctagaggggcactaaacatcactggagtcttactggtgagaaagaaaggggagaatgagggtaggttgacatctcacagtgtcttcccccagcatgtaatactagttttccatctgagacaataatataaaattaatttttaaaataatcttatttaagtgaaaaaaggaattcattaaacacttgaatgtaattactagtctaaatcatacgttggcaaacttttgctgtaaaagaccagataattaaattttttttgtctctgctagccatgctgtcctgtcgcaactattcaataccattgtggggagaaaacagctacagacaaaaatgtaaacaaatggaaccccacctctactaaaaatacaaaaattagctgggcatggtggcgggtgcctgtaatcccagccacttagtaggctgaggtaggaggatcgcttgaacccaggagatggaggttgcagtgagctgatatcaagccagtacactccagcctggatgacagaacaacagagtgagactctgtctcacaaaaataaataaataaataaataaatagaaataaacaaatggacatggctgtgtttcaataaaactttatttaaagataaatggacatggctgcatttcaataaaactttatttacataaacagaatgcaaaagagatttggcctgtaggctatagtttgctgatgcctggtccagataatttgcagatataacaaaacaatgaaggcttaatatttggtggttgacagacatagcaaatttaccaaggagatatggggatagccaaagtttaggaactaggctaaagtttagagctcacactgtaacctttcacattaccatggtattaagtacaatacagttttggcactctcatgaagactgaaaatgccaatgagtttaaatagatacataaagtttgtttctctcacaaataaccaccgggtgagagcagtctgggtctattatggaagctccattgtgtgctggaggccaggtttcttctgtcctgttcctctgctctcttcaccataggttttccccttatttttttgtggtcaaggatggctgctccagctcctgccattagatcggcattccagctgaaagaaagaagaaaagaggaaggagagagtacctacttccctgtaaggacatgcggtggatattgcatgtatcactgcctctcatatcgctttagccagaaatgagttacccggtcatacttagctgtaaggaaacctgggaaatgtagttttcagcagaacaacaatgtactgtagctggaaaataggttcttattactgaggaaaaggatcagaaataggcaacttgcatgctctgccacatgagctagagatctagataaggtgaaagtccacatgtgtttttccttagaaagactaatttcagtttgtcttcatgccagaatgacattttccaggcaccactttcaggctaagatttcccttatgcttcaaccattagtctctcgaggcagtagtaaaatcttattcattattgtgctccccagcacggtgtaaaaagtcaagttaaaaaaaaatgacagacttttaaattctagttagagaagaacgtctttttgcttgtttgtctgaagaaagtaagtgatactgtttcaagagtcttatgcctaagcacccatgttccatgttcatgtttatgagcctggagatgcacactgctctcaatttcttccgctttcaaacatttctgtttgaaacctctctgcactttctccccactgtccgccccttgccgtttgtaaaagaaggagcaaggtctcccctttgtcaaggcagctatgggtgctgcacctggggaggttagttttcttccttgtcacttccagtcagttatggctgcttttccactattgcccactgaagaattctcaaattatatggtgagctacggtaataacagaagtaaaaacaccttgctgtgatttacacagaacaaggcgtgagagattgtcaccactgcatgaagtgtcccattatttgtatatattttgctgttccttcccagtggaccccactgatcactgagggagatcttatggatagacccgtacacccttccagaaagttaatagtgtatgtaacgagagaagagaaactctggcacaaggaatacacaaacctgggttggctctcactttccgttacagcaacactccctgctgaaacagggctgaaatgtatggacacctttaatccatttcttcttggaaataccttcaaaattcatatttagcttttaaagggaactacctttttaaagaagaaaaaaaccgcttgataagtgcaaactgacattaaatggagtttaaaaaatgatcagggttttaaaatatgattataatcagtgagaatagtggagcagagtcaaatcattattgatctcgctcatgggggtaggaggaaagaactgctgtgaattaatcagaaaaggagattttccgtaaagcctgtccatctgtgaattctccccagagtccgcctcagccctgggacccccgagacactgggcacttagttaaccctttgatagaccttccaacaggatctacaatcatattaaaggagaaaacatctctgtgcagggattgtatttgagattttgaagtggaaaaatagtcaatggtataagttttggagtcagactagttttcattcattaatttcagtagctatctcatgagcatctattttgtaccccacacagtgttttaggtgttggaaaaactgatgatcatggcagatgactcttggagctgatatcccagctagtgggagatgagccacggaccacagatgagtgaatcagataacaacatacaatgatgtcataaagacagcactaacaggaataacagccccacatttttggagcactacgtttcagatcctaaactcggtgcttgtagtatcaactcatttaactttctccatctttgttgcaggaagttctgggattcctctcattttataggtgaggaccctgaggcacacacacacacacacacacacacacacacacacacacacacacacacatagagagagagagacagacagagacagagacagacagacagacttgccccaggttacatggcttggtgttggcagaggcaggatttaaacccagcaactggctctgaggtccaggttcttagcggttgcattgttacctgcctctgcatgaagttgagagtcatcattgtttttacaacccagaggctcaggagctgttgtctcttcccttcccattcagtactgggcacaggacagtggctggcgcagtgagctcacccaaatcatggccaaggtgcaccattttggcctaggttcttctcccaacatttgcctttgggtccctcctggtgtggtgggggaaaaaatctgagtagcaagaacacaggtggcctgagaatgaaggggaactcaatagggtctgtttccccactggacaatagtaaagccaaaacgcaaagcaaatgacagaccaacaaacacacacaagaaaaaacctcagtcttatcaggaaacagcaaagaattgagattctgtgaaagccaaagcctccataaatgattatttcagtggaaggagagtaaacaagtggccatccaacctcttctccatccaaaataccttgcattcaataaatatggaagtatcatgtcccctttaggggactgtggccatttgaaagttttatttttcagacctacatcactcctctgctttatcccaaacacatgacaggaatcaggacaagaaccttaaagaattttctcaagccctctctaattttcttggggatcagagctaacaactctgatctgacaattgcatgcctgctgttgaggagttgatcctagggtgggtcacgcatgcatgtgcacacaggcatgcagccaccctcatccccacctactcgaaaggaatagaagagaaaacaaccccgatgggccatcctctcctgtctgcttcttctacttctgatgatgagcagctttttctactatgggcttttaggttcctttctaagaagagaagtcagccagggctcatggtgggccaccttggggtagccacagaacgtagaggggtgcagtgctgttggcaggtggggcttgtctttaaggaacagcctcaccttgctgcacatgctttcatgagagtttcattccttggttcttcctgtctttgcagagttgttggattggttgtcatggttggtattaagaactgcttcataataagcaataaacatcttccaaactagagtttagaacaatatccagggccatcttgatgggtgtgtgaccaaggtcccatgctcagtttgatgctcccctgtgtgggcctgaaattcttaataatgttgagtaaaggccctccattttcatttgcattgggctctgcccgttagatagtttgtcctgacagtacaataccccaaatactgttaaagaaagtggcttgaaatgagagaactgaaaaaataatgtgttgatttcacggcctatcagggaaggaatgataccctgacggtaacatcctagaggaagagctgtattgtccaagtcccagagaataagggagacagtgtagacttccagaagggttttagagacagtctaggttttgagacactcaacgcgacagaagtgaaagatcccccctgcaaacacaaatcccttccccaagagaaaggagttttcatgatcctttgaagagcacctaaggaattgggcagttgttgtttttaataaacttttaattttataacagttttaaatgtacagaaaagttgtaaagatactacagggaagtcccataaactctgcacctagtttcccctattattaacatcttatattcgtatggcacattttttacaattaatgacccattaactattgacccattattgttacctaaattcaccgtttgttgagattcccctggtttttccctaatgccctcttcttgccattcagggtcccgcatgacattttgtcatcgtggctcctaaggctcctctcagccccggctctcagtcactgtccttatttttatggcactttggaggactggtcaggtgccttgtaggatgtccctctactgggataggtctgatattttcctcatgatgagtctggggctgtgggtgttgaggaggaagaccacagggatgaagtgccattttcatcgtgccacagccagggtccccgctgccaacatgatgtttccctgttgtgatgctgacctcgagcacccggccacagtcattttctgcttctcttgggagacttttgacccacaggggttctgcttttctctgccaaaagtatctggtacctgcctcatctctctgctgctgcatgcgtttcctttcgttgtaacctctgccccctgcccccaggagtttccccactcaccccacttatgtttcctgtgatgcagggtgcaattagtgtttccagagcagagttaacctaggcccttatcagagctgctgtgtgagactaagttcattatagtctttacccaaaccagaactttattggagacataaattacttttattttcattgaaaatatttgagatgaactatattagaatcctcgctgagaaaatataccctggacctataatcagtggagaggtgctacctataaaaaaaagaaaaaagaaccgtagggtagacttttgcactgacacctattttatattttattatttgccctgtactatttcgtcaacttccatcccctctcctggtatttattagcagatgggcatagctttctccccctcagagaaccttcaaaagagtgaagcacatggcagattctctcccagtgagcaaaaggccagctgatgctcagtgctgaaagacagacagccttgggtcctcacatgtaggggagaaatatttccaaggtaaatagactaataatttttaagatagaatttttgaaggttgcttttgcatagtgaggttaaaaatgtctcagacaggaaggatagaggataccaatttttcaccctggacctctgtcagtcccttgccttctgttgatgtactgtggcctcccaagtgtgtctgacatcctcgtaaattcattcttccttcctgttctgttcgagatccctccaaagtcaggagacactggtgatgtggctgcatctttctctgcctctgtgcagccaggtgaggaacaaaaagcacaggatgtctgtccatccctgcctagccaacgagtctcttgggccaaacatgcccttttgtcctcttatatttcatctctctcctctcccaggtacagaggacaaatgaatatagaagggtcttcctggcttgcttgatttctccctttgaagagctttcaccttaagggccgattcctctcctctgcatgaggggccattttcttttatcctttttttgtttttgttttttgtttttttgagacagagtctcactgtgttgcccactctggagtgcagtggtgcagtctataggcatgcaccaccacgcttggctagttttttgctttttttttttttttttcagaggtggggttgcaccatgttgtccagtctggtctctaactcttgggctcaagtgatcccccttcccaaagtgctgggattgcaggcatgaaccacccaccatgcctggcttagggccattttcttatgagccctttgccttcaagtggatgacaaagatgttttttgtggaaaaaagtcaactcctgcccttctctgaagtccatgctattgacaactttaataataaaagccaaagtttatgctctttttctcccccatcccagcttaagacaagaagaaaaagattttccccccgtttttttcttccttttaaaattgagggagaagttatgagcataacaaaactctcatctagaaaatgttcccgaacctgcaattactggagtgtggccacctcatccggaactccaggacgcatttccacataatgtcccttttaaaggttattatctacatcatgccatttctgttgccctcatcttttcccagtctcatttcttagaggctacctaaggtttctcacccagaaagaaccttcataataatgaactatacctaataagcctttcctagttagggggccatttggggaagaaaatggatagagtgggagaagtacttttgagatgagatggactaatgatttttcaaagtagatttttagaaggttatttttcatggtggtaataaaaacttcctaagaggatagcagggctgtgggatgctggttttctccacagacctatccctgtcttaccttttgcttgtgagctttttattttgagacagggtctcgctctgtcacccaggctggagtgcagtggcgcgatctcagctcactacaacctctgcctcccaggttcaagcgattctcctgcctcagcctcccaagtagctggaattacaggtgccctccaccacacccggctaatttttctatttttagtagagacgcggtttcaccatgttggccaggctggtctcgagctcttgacctcaggtgatgcatcccaggtgttgggattatgggcgtgagccactgtgagctttgtctgctgagtttcgggagctcatggaagttattctcctttgagggctgtcaggaccatttccatgcttgggatatttgtgaggtgctccccccatgaagatgtctttattgatgataattactcatcccaaaacatagcccgcagccatccttggatgtacagcttgtagtgctgtagtgcctggagctgggaggaggtgctgactgccaggactgacgtcttcagactgattcgtctaagctcggccagcccctgccctgcttcctcttccacctccctaaagttggatggccagattttgcaaataaaaatacagaactcccagaatacgtaatttttttttagcataagtatgtcctgaacattgcataagacatatttatgctaaaaatgatttgttgttcacctgaaactcatatggaaccagtcatccatattttatctgccaacccttccctaaggcaaagcggtagagacctcggaccctcgtcctttctggcatattcctctctgggggacttcatctgcttgaaaatttcccaaatctgattttttcttcttaatcctgatcagtttgggcattcctgttcatccctgctcagtcggcctggggcctttctcacagctgggttgatttctgggccttctgtttttcaaacactaaactggttacctctgaagagctgggaagctggttcccatccaccaagtgtcctgaccccccagtttcctctggaatcagtgcatctcgatttctctctctcttcctctctacttctcatgtggtctctgcccacccctctgcctggggttgcttggcttaggtaaggcctggccttttcaagacctggggcactttagccaaacaccctgaccagaggagaggagcagccagtcgcctagattgtccaaccttgactttgccacaaaggaaaggccacatttgctttctttgttttcaaagctaatacatggaagaagaaggcttaactttcttttctctttgagattcgtgagggagacagcatcaaagctgcacccttctggcttagaaaatacacccagaagctataatgagcaccaagatgagatcttatatacagggtacatttctatgctaaaactattttaaattttattatccacctcatgctatttcatctcctctcgtcctctcccccttgtatctattagagcctgggtatggatttctttccctgagataagtttcataatcacgaagcatacttgacagtcacacacagcagacgcagggccggaagaggttcagcaaggaaaatggtagctgtgttttcctctctatgagagaaatattggaatattggaggtaaaatggatgaatacattcccccaaatagaagttttgaaggttgcttttgcatagagaagttgaagactccatgaagtgatagaaagcatgtagatatgacaattatttttcttttgttcccctcacccagcatcctttggggtacaggcccacttcccatttttcttcccctttctccacattgactttttttttctttaataaatttttatgatggcctgagtgagaaaaccaaaccaaacccattcccagcgcttccagccctcaggttttgttggatgttcatgcaattttctcattatttttctgtcagtgttcatagaaacagtgtaaactacttgatttcaaaaccattatgttagtttactgcattatcatttaagctgtgtattcttttgtgatttgaatttagtcataacatattttaaaagataagccaagaagatttctcgaatacatttttgatgacaactgcttacggttcaagtttccccccttctttcatcttttatgtgactttcattttacatccttgatttagttattctttctttctgtaaacacttttttttttttttttttgagatagagtctcgctctgtcgcccaggctggagtatagtgaccttggctcactgcaacctcttcctcctgggttcaagcgattctcctgcctcagcctcccgagtagctgggattacaggcgcgcgccaccacgcctggctagtttttgtatttttcgtagagacagcgtttcaccatgttggccaggctggtcttgaactcctgacctcaggcgatccgcccaccttggcctcccagagtgctgggattacaggcgtgagccaccgcacccggccatctgtaagcattttaagcagaccttgtgacttctattgagagaagattctggggcagcacagtcttacttctccagttttgtctcactcaagaaaatacccaggtagacagccctgtgctatggtgaactggttcctccagcccccacccctgcctaagaccacccccaggggaggattcagggaagtggaagcgtggaagactctaaagattaccttctctccccttggggaaggtttgtgtattttttattctgttcttctcacccccacccccacctacccccacagtcccccagctgctgtctatcctctgtgcggaattgtgtgcctgccacaagattcccctcctgcggcattctccaccccttctgcagttggaattttctggatgcttgacattgtttacactcttcttcggacaagggttaaaggctacctcccattttctgtcagatcatagatgtcctttcctctattgctttagaattgccaaagagactccttttgtgagtggtagaatagaatccttcaggaaagatgtaaaggctttttctacacctcaaaaatggactttctaggcagttctaataatacatcaattgctgctcttttaaaaacatctagaaatgagatttactgattgatttggttggtttgaaaattatttctaggggccgggcgcggtggctcactcctgtaatcccagcactttgggaggctgaggcgggcggatcacgaggtcaggagatggagaccatcctggctaacacggtgaaaccccgtctctactaaaaatacaaaaaaattagccgggcgtggtggcgggcgcctgtagtcccagctactccggaggctgaggcaggagaatggcgtgaacccgggaggcggagcttgcagtgagccaagatggcgccactgcactccagcctgggcgacagagcgagcctccgtctcaaaaaataaataaataaataaataaataaaaatatttctagggaaatactcttcctttttattccctctctttcctaaatgttgcttttgtcgtcctacctgtattttcaggtaagcttttgggtttgtgtgtaactgagcttgtaaatttttaatgcattttaaccagactgaagaaatttacaggaagatagagatgctactgtgcgtctaggagatagtttctgaggtaaaaaagaaaaaaaagtcctataattaaagttttatattgtaaaataatttctacagctggtgtgaggacaaaggagagacttcttagaattctgtaagaatttggcccctctcttcctattattcctccattcctctttgctaccccacgtctcagcttccaagttacatgcgaccttgaggttcaagtctccatgatctcttcatagcagagcagagctaagtcttgatattttattccttgctttggtctaaaagaactcataaccggccccctctatttttttttaatcagaacccacagaaaccattgagaggcttttgctgaaaaaaaaaaatgccacttgagctgcattgctaagggttgcagttcccgaagtactctctcttttgaggtggaaatcttgagaaaagaagccaagttgaaagtatttcggtgaccccacagtccacccggttgagctgcttttattacaaacttttatacgtttataagaaacatatataagaaaacttttgtaagaaacgtttataagaaaatgacacttgtaaaataagccagaaagcgtagattcttgagtaaatttctgtatgtgaaagtttttaaagagtattttgggcaatgtttatttctttcctctttatctcagtcctcttgtcttaaacagtattgaagaaatgctgttgaatttggtacctgaataggattttatattactgaaatattcaaattgactgttcctttagtattgtttagaagaaatatctgggtgaaaggaagttttctgctttccaaatgcttcactttcctctacgccacaaaaaataagagaactgaaagagaagaaagaaaagtacaatcgcctaagtactccacgagatggaatatctaaacacgttatgaaaacagaacaatattcccccatcgtcttttgctggttttcttgtcgaattaagttttactcgtctgaagtcttggtttgagcgaagccctaaatgctccttcaatatttgttgcttcacaaaggctggacttagaatgttttctttcctaaggtgattagaaaaccaaaattgatgacgccaactctaatattttctttcttgtttctgtttctagtttgacaagagcccatttttcccccctcaggattaatgaaggagagaaggggagatctttcttcccagctattattattgaaatggatcaatttctcctttttaaggatgcaaatcttgaggaaaaatgagctctctccaataccttaattatatttcaagaaatgggctgttgtttatgaactcatccagtattgagaaacattgaaaataatcattcaaacagtagatactcttgatttcaattttggcatcatatatttcagaaggtattttcactaattatattttttctcctcatatatccttttgctgtctaaattttagatacacacttgtggtctaggcacaaatattaacgattgattttaaatatgactttccgctaaatattgtttggaaaaagaaaaacaaatctctaaatgggaaatcttaaattgattaccttttatcaaagaaataagagaaatgagtaccactaagaaaagtaatttctgaaataaaatgtatgattactttagaagagacaaactttcaaaaaattgcactaggaaagagaagtaccctggtatgggttgctagattttgataaatgtatttttctgctctttcgatgagtccttcagccacatctctctgaggaaccagggctgaggcttcatcaccaagtcaaccctccttagatggttttgtgaggtggcattttagcgattcctcaggctggtcacctcagactctcaaagcagatgaagcgccctggtggtgtggagatgggatgattcataacccatctcctctgtggcatttaccacaataccaatcattgtgtaattctgtcctattttgttttatcttcagctacgtgtatactacaacaagtacatagaatagagcttcttaattattagcaataaacctgtatttaactccagggcaaggcagggcaggggatgagggagacctctattctttcccgttgtcttatttactttccctcttaatggaatcttttcttttgaattcagcacatacctaaggttttaagtgattgaaatattttaactggatttttttcccccactaacatagtttaggaaaattcctctgaggctgaagttatcaacgcagctgcctttcattgaaaaaatagaaaagcaaagaaaactgctcagacaggtacttttagaggtaaaaggtttacctaatcacgttgaagaggtcgaatagctaagtattatgtgaggatggtgacgtaattctctgaaatcaagtagatgagagttatttcttctttttatcctttgcacttgtgttactctgccataagtagacagagggaggtgggaggagacacccttggtgtttgttgtgccccatctctctgtcacaaatcgcctcaaaatgttttcccaaggagaaacaaaatggcagcctgaaccctaggactccctcatccactcactccctccttgtttctctgactagaactaatggctctgtaccattatttttcctgtaagaattaatagggagatattcttttcctaaagccattagttaagtaatattgcttacagaattgctgaaacaggataacatctccttccccagagtgtaaatcttaagaaatgatgaggcaattgcttaaacacatcaattatatcccaaaacctgaacttttctctctacaattttcatttagagttaagaaagtttgaaattaatgatccataaagtagattctcctgattcaattttggcactgaagaatgcaaataatattaacaatttttttttcccttcatttagttttctttcttcctcacaatttatcctctctttattttagcgcattctcttcttgtctgggcatgattaaagttttgacttaccaaaagattttaagcatactttccccactaaaaatgtttttttggagaaaatggtaagtgaagtgttcttcaactgattgcctttcatcaaagaaagagaagacgaatgagaaccatagagaaaagtggtttctgggaaaaaaaacagatttaaaactattactgagagaggcaaagtttcaaaaaaaataggatagtacagaaatactctagatttggctagaggtggaaaaaatatatttttctcttcctttcatgaatctctcagtttttctgtgcctgaaaaactaaattttagttactggtgtgtgaggatttatctctgtctttcagcaacctgttctgatcttctggtaagaggactgatttgacttttagttttgcctgagcatattcaggtataatacactttgggggttttcctcattattttgagtttgaattttagaaccaatatgattatgtgtctcttatttttctttccaactgataacgcaatatcatgtttgttgcaaaaaagaaagtagcattgacttatccaaggaaagcctgacaacttccagccacactgcccctgaggccatcagagttaggttggcacacatccttctacatctttctccactcataaacaaatacagacagacaccttttgttgttgttttttacacaaaggctcataccagatgtagtaatcgccaattcttttcttcttaatatgttttgtatataactctaggccgatacgtatatagattgttttaatagtggcatacaatcccctagtttggatgtactactatttatctgttcatcccttcctttattgatggatgtttatgttgatgcctattgtttttcctaccacaactattgctgcagtacacattcttgcctgatttcccaaagagcaattgctggatcaatggttttatacttacttatttcaccttataagataccaccaaattacttttcaaaaacggacttactctcccatcaatatttttaacagtatttttaaaaagaaactttgcttcagcaagagagcaaacaaagccacggtgaagctttgctatcagagtgggcggcgcatgtgagtttcttaaataacaagaggtcaccaccaagcggcctctcattcaaattcaggccacagatgtgttgggtagcacaatgctactgtcgttttgaaaactaattagttatgaatgtttgaaagcatgtgaaatacagattttgatttttctcctgaaaaacaaacagatctggtgagctggaccctccggccttcattgtctcagttggctggagctaggggtcagccgcccctggggcctgggcttgctgtttggccatccccaggcaggcacccgaattagcaatttgtctggctcctgtagcatttgagtttgtgatctttggtttaaactagggtttctcaacctgggcactgctgacatttggcgacactccattatttgttgcagtgtgggatgtgtagcagggttgctggtctccacccacaacatgccaggagcatcccctccactccgagtcaggaccacccaaaatttctccagacatcacccttgcttcggaaccactggtttttaacaaacccacaaaatgcattttcctcagtcaattttgaaataaacttttcaaagactgttcctgggcagttttcattatttcatttgatgaaggaacactgttgaattctgtacacgaccaagctttaaagtcactgaaatgtttcaaatcagccccattcactgaatttggagaaagtatctgagaggaaaaagtgatcaaaacacgttcatctcaggaacagaaatggagagacaacggtgattacatatggtttctgaagtaaaacctttacctaattacacacacataaaagatacaatttctaaatactgtatgaagagggttgaatacatctctggcacaaaggtagacattggctttgttcactttggttttcttcggtggtttcttttgtttgttcatcacgggcctgggccagctcacctctccctccgcagtctgtctccttgcgctcacataatcctcctctgaagggatttctgaggtatttggagccagcaagaggccagggatgggtctgggggtctctccagagccctcttctctctctgtgccttcactctccttctctgacaggacttccgacatcttttctcattagaattaatggagaactatccccaaagctatgaagtcatagtgctctgaaattgctgaaacagaataatttctccttcattctagggtgtaaatcttgaggaaagatgagaagctgtttcaggtatatcgataatgtcccagggaagagacccacatagacaattttcatttagcaacaagaaacttttaaaagaatgttacacaaagtatatcagccagtttctgttttggctttcaatctttcaaatggcattttcttttttattgtcttttttccttctctaatttcataatcctattttcactctgtattttaagggcacacacttgatgtctggacatgacagaatttttaaagcaaaattttaaacaccgctttgcactgaattcaggatttctgtgaggggagggtggttatcttgattgcctttcatcagagaaatagaaaagagatgaaaattactaagaaaaatggttgttgaagtaaaagattagtttatgattacttagaggcaaactttcaaaagattgcattaggatagtgcagaaatacccgaggctgtacttgataaatccatctttctggtcctctcccccaaccctccctgcctgtgcagctgaagtcggagctgcttctcactgctcaccgcccactgacttctgattattttttgattggcattgacatccaacgtctcccattctctctgcctgagaggaataaaacctctttcttccatcatttttagccatttttttcgtaaagaggcttcataaacaaaaaatgtaataggattgcagaaacaaatgaatttactgtcaaagaaactttagcataacgtcaggtatgcaacagagacttaaagaaaattggttgaataattacatgtatagatgattcagacttagaaagccatccaggacaggggtgatgtcagatgatttactgtgtgcatagttttgctcttttccatagatacaggttgggttggggtcctatttcatggccacccagcaccttcgtgctttttctttcatgctatttactatatttgcttggtgaattttttatataattatttgcttactgaatttctcccccgttgaactataattatcatgtgggtgtgtctgcctcgttttccacagaacaaatgccctgtgtttagcacagttcttggcacggttgttggttgtgcttggtgctcagtaaatatttaggctcaataacataggctcgaaaacaggcttaaaaatatttgaataaataactgtccacaaagttattacttttagagatctgcccagctttctataagtaattgctagcacattgtggatctgttaattcccgggatgcttctaaacaatttaatcacagattaattaatagtctaggaaattactcctatattcttgtttatatttgcagcttgcttagaaggttgattttatagactcatttttaaccctttttttaaataataattcagtctttggaatccacattcatggagttttggtgtattgggacaaaccaaaagaaatatatcaaattacttacatttttagttaatgatatttgagcagtgcgtttatagcattttaataaggcctagacattaggcagctggaagaagatttggcattaaagatgtctacagttatgttgtaagtttcatcatgttgtttatttatttcattttctttctaagtattttacagtttcctgtagccttttcaagatggccacatttaaaattgctgtaacactttaagtggcctcttcctctaaatgcagtctggcaattatttctgagggaagttattaaaaacacagcctttaatcagggaaagaacagcacggcacagagagctgtgatgagagatggtctctctaataagagtcccataattgtgtaagagcgatcgaatttctgaagatggcattaagacagtggagtttgtaatttctgaggatgtaggaagtgattcatacagtgtgatgctgaagcctcaatggaatcacattctgtgatttaaaatttggccagggaactacttcctttttgaaaagggccattcatttaaaagcaagttagtgtccttcctcaataatccaaatcagtttaacacacttcagtgacattatttgagcatttttcacaattattaaagataattcacttttctctgtagactgcagggtcaaaaacaaattagatcagtggattttcttcctttactttcatagatgagtcagaagttattggtcaaatgtgcacatgacctttctacttaagcttaaaaaccaaaacaacctgttgggaagacatttggccaatctgattattttctctacactaattggttttacttcttcattgaattgaatgaattgcatggttgttttgtcactgtggggacagagcttaattcacttagagtgagcacttgtgcttggtgaacgatgaggctaaggaaatgcatatcatcaccattaatttttgataatttttcatgggtgagaatgaaaacatatcttgaatccaccccttttttccctttctatttctggtgccctagtcaagccatctcatctggcccctggattatcctagtaagcttgtaactgtttttcccacctctcctcacctctctcccgagtttggcttcaaaatttaaacttcttaccacagtcacttgtaccccacaagatctgagtccttgttgacttccccaccatcatcttgcccctgcccctgcattcacgactgtccttccacattggccccccatgggtctcttgctcccgcaagctgctttcccctttaaggtctctgtattgttccttcttttgtctagaatatcctttgtggacttgttctttctcactctgaaggtctcatttctgatgtcgcctttctgagaagtcttccttgactatataaaacagtcctccctggctactctttggattaagccccctcattactctctttactaccccctgcttatcatgagtctgtagtatgctcccctccatttctcattagtgtctggaatagcctcctgttaattgttactgcctgtaatactctcattttcactctcggtaatatccccgtcctcgatttatttcctttgcgaccccatcacaataggcgtctgcttccttgtctttgcttctctttccccattacagtagaagctcttgagggccagcgtcacctttgttttgttcttctcagactcttcaaggtggagcatggtgcctgggtcattgaaggggcccaggatgtggttgttgaacaggtgaatggagtaccaaaagcctggttctgtgccattagattacctgagtacacgggagggtcaagaaagattgtgtggaagaaaaaagcattgctatctttcccaaactgtgcacttctctacggattttcaaagttgatttgctcaggattagcacacttggtaatctagtaacttaccccttgagatataagaagtggaactgttcttttggtttaagatggaggatggaacacatttatttacctcagcttttctctaacaaccaacaagaggttagtaattaaaggtgtttttaatatataagctcacaaggagaaacgacttggagaagaaatgatgccaccagtttgaaaactggagtgcagagtctgaatgggaactgatgtagctgaccccaaggaatggaatcctgatttaacagtgagaagactccccacaactcagacattcatggtaccaggtgtggctgaaaacaagattgattgaaagactaagaagcaatcagacttcattcccactccgtttctacttctcagagcttggtaacttccctcacccttggagaagactaggggcttagtctctggacagcatacaaaatgctgggggacacttggcataattagttcagcaggggagtgaggggactagattgaaaatggggtttgagcaaatgtgaatactgcatatgagcccccagaatctcttctctaattttgactccagaatgccggcagcctggcttctattttccagtcaggagacccgaggactcttcttgtagaagctgaccagtacacgtggagacctgcagataactacttcagggttcccactgaaacagggcaaccacataacctaacagtagggcccatggttgacagattgcacttgtaaagaacaccaagtcagcttttttgtgcccatttcctaaacataagcagcgaagattgctgtatttctcaggaaagccaccaacctaaagagagaaataaaaacaaaccaatggaaacaaaggaacttggaagagggactatgtagggggaggcaaacttcaacaacgacaacaacaacaacccattattaacattgccgggggtaaaagagaggatgttagagctatgaagtaagaacaggatgctataaaaaaagaacatgggaaagaactcttagaaattaaaagcataatagcagaaatagaaactcattggaatataaagttgaggaaattcccccaaaagtgaagcaaaaagaccaagaaacagaacatcacagcgaaaagataagaaaaatagaagattatactaggagatccaataacccaataagggcaattctagaaagagagagaagacaaaacagaagggaaaaaaaatcagaaataacaggtaagttcaagagttatattgtacaacatggtaactatagttaatgacaatgttttgtattcttaaaaattgctgagagtataagtgttcttgccaaaaaaagataagcctatgggctaatacatatgttattaataatctaatttagccaacctacaatgtgtgtatatttcaaaacaatgcattgtacatgaggaaggaaaaggaaaaaagaaaaacagaaccacatttttctaaaacctgaggacatgattcagattgaaagaattgattgagtgcccagccaatgaatgaagatcgacccaggctgtggtgacaccagaaataaagaagagcctcggggattccagagaacgacatacaaaaagatttcatccaaaggaccatgaatcataaatcatattgtctccagacttttcaacaactggaacgcaatagagccgtgtctgcaaccccaaagggaaatgatttccgattttgaatgtcatacccagccaagctgccaatgacatctaaagagttatacttcatgtaccctttctcatgaaactactagaagttttgtgttaggaaagcaggagtgtaaaccaagaaaaaagaagttgtagaggttcaggaaccaggaaagaggcgaagagaatcagcacagcggggatgaagggagaccccaggggcacagccatgctgcagagaaacatggtccacttggagcaaatcagaaagtttcaaggaaacatttctcacagaatgaaatgaaacctcagacaattggagaggtggttggaaaatgattttagaaatgagtccatagaaaactcagcaaaatttttaaaaagcaaaatcgtcattaatcccagggaaagcagttttcacaagaaaggcaacgtaatcgtagtatactacaagattcagtgctgacaggtattctcctaaacatactaatataaacatggaatattcgcctaaatgaaaacaggccataggggttagagaactgttgagaagatagagaggtggaatgtgtgcttgtgtggggggtcatgaagtttgaagaggaggagagctggaagaagagggaaaccctcctctctccccatgagaagtcacagctactacttccacaaaatgtagttctataacaatgttatcagacatgaaggagctaaaagtcaaaagactcccgaatgggaaaagatggatgggttggcaggggttgcagtttttcttaatacacagttaggcttgacttttcagactgcacatgtgtacctttcatcaaaataaaagcaaatttaaaagtgggtctagtgcttcttctctagtgacacagtcgttttaagatatttctctgatctcatatcatgatggaacctgccctctctgaaattttgtgatccttttgactggtatgccaggtcatcagtgcgggtgaaggatgaaggaaagacaggtatgagaagtgctgttttgtggatattgtcagggcccttctttccttccacaatcacaacaataaccaccacaacaaaacaacagcatcacaaaagccaacctcatcccttgctgcccagcactctagtgggaattaagacctggtttatatttctgggttcccaccatgcatcgagtgaaacgtctattctgactacttggtagtatgtcagagaattcaagctgatctaaaatttacctaaacagacatgaccaggaatacaactctgatgagaagaagcaacatgaaatatagatatattttatgatatgtatcattcaggggtttttctactttgagaattggttttgccatttccttccttcatagagtggatatattttatttgaccaaatgtgaattggttggagataaattgagttcttgcacacaccctgtgagatgagggttaatgagctcagaggcgatcaagaagtcatggacaacctcccaggaaattactctttgctaattttataattccagtcatatgtaaatgtgcctctccccttgcaggtctgaatctgcaagaggagccatcttgtgccacctcagaatcacctccttgttgtgggaaggaagagaagaaggaaggtgactgcagacaaaccttaggaaccctctctcttggtacaagttcaagaattgtcagggaaatggacaaacgaactgtgaaggtgggcatgatgattttgagctgcctctacctattcctggtctagatgtatagccctgcttgttcttgctgctcttgttcagtgtggcagaacttgctcggatcaccttatgaagattcgtggcacagaaagcccattaagacaaacaaataactcaaaacattctgtatcgaatgagtagctttggtagtgcaaacattgggatgatttctgatggtttctttaaaaaaaaccccaagtatgttattactgcacacctgaatagagagatggctgacagatgccactgcaacatgaagcccccccagacagactgtggggctgcgtgttgaaaaccactaaaatatgtatccagaccacatttggaaaaacactcatccggaaaaaaccaaaaaaccaaaaaacccttcaatacacagtcctataaaatagtacatccgcttcatgagcggtagtgacttaaaaaaggaagctgagaactggtaagataattgagtggttttgtttttcacaaagccagataaaagcacaggacgtcagcaacctattttgtatcaatcaggagctttattcgagttaatgcaccaattagttattaatggaaacttattgagggcgtcatattgaagttcacccttggtaaagaatcattaagacctcaagacctgttttcattgaggaccacgtttctgaccacatttttctttgtaccaattaacctccccccccactttttttttcctttgcactttgttgcaggatatttctccatctgctggtgagcatggtgactgtactactcacagcactgctgccacatcaggattatctctgcaatctgacacctgcctggcagtggttaatgacgtgcctctaccccctggcaaaggtcttgaccttgggttgctggagactcagctgctggcctcccaggattcagtctcaacagatcccaaaccatacatcttctcagatgctcaaaggccttcttcctttgggtccaaaggaacttttccccaccatgacattgctacctctgtggctgccgtttgtatttctctgccagtgagaacagatcacatagcccaggaaattcacagtgctgaatcacgagaccacagccagactgcagggaggactctgacatcaagctccccagacagcaaagtcacagaagagggcagagcacagaccctcttgccagggagaccttcatctggacaaagaatttcagattcggttccactggagtcaactgaaaaaactcatcttgaaataccagcttcaggaccaagttcagctagttcacaccacaaggaagggagacacaagacgttttttccttccagaggccagtatgggtgtggggaaatgactgtcccctgcccctctttaggaagtgacggtaggaaacgtcaggtatctggattaatcactcggaaagattctgtggttccttctaagccagagcagcccatagaaattcctgaagccccttctaaatccctcaagaagaggagtctggaaggaatgagaaagcaaactcgagtagagttcagtgacaccagcagcgacgatgaagaccgattagttatagaaatatgaagcttccagagaaacatggtgtctggtcaaaaagactgttgacgcttcacaagtaaatgttgtcaggctggcggaagaactaaactctatctgtgaaacacctacagattaggaaagccattttgagttatttacaagccaactccaaccaacttctgacccccaactcagccgcagcgttccccagctccccttgggagtgctctgctcatcttcaaatggtgccaggcagggcagacatggcaaggaagcaaactctgcaaatggtcaacgtgcacagtgactgggccttgactcccagcctcgtcttctgcacctgtcccccactgcctctctgcaatcaaatggcactaaccaagaaagccaccatcaacacatttctccacaagtggaccccacacagtcgaggcaactggctttctccattagtaaactgaggatttgcttccaaggtggagagcacacttgggataattggagtagcttgacaaagagacgggggtgtgaactgggcacaaagatacttctgttcattttggagacaaaattcagatacattaaaaaactgaagcttgttcagagtaattcacgtccttggtggagttgtaaatacacttcaaaatgcctatgatccggtgacatgctgattacttttaaatgttgcacaaatggtcaatgcttatttatggtcagatgatgcaagcacatgctcttgtgcctggtgcgtttgctgtggagatctctgagactgtcggtttttctagttcttgcaaaggaacggtgttaaaagttaatagaactgtctctctgtaatgagtcattttttgagagggaaaaattcacttattttcctctgattcttcttgtcatattgtgctctgagcaatttcaattagagggttacattttagtaatctgtacagcttcaactgatgcctgctcgtcgtgacgggagccttttagatttccttcagaagcttcaaggatacaaaactaattggagttttgacgctgttttacatctcggtaattttattttcggggcttagtgttactttgctgtcaaattaaatcagcctctgtattgtgcacgtcagaactgcacagagaaaattccccagtattccaagccggtgcgcccctgtgcagaagaaaacagatctacgtcagccagcccggggggcaaagcctcagttccactgccttcctctccctctccttccacgggagaggagaaacttaaagaggtttacattgctgcatttcaataaaattttatacttgcttttggtatgattttgtacaatttgaaatttgtagctgagctcttttggtgtaactttgatgtaatgatgttcatatgacatcttgtacttcagagacacagcagcaatgcagagcatctcacacatgtgaatacacttcagtcagtctgtgcctgtgactaagtatggtcaaatttcaagtatcttcatgtgaattttccaattttggtgtttttcatagaaaacttcaatgccagaccagcttccctggttacttagcatatatttgtgaccatttcatatgcactcataaatatccaaggatttcaggcccagccaagaaaaacataagaagggaggtaaaaaggatgttggacattgacttagtgtactttttaaacccaacaaaagcgatgtggtgattatctcccttttcgaaggattcatgccactgtaatgagagaggcagtgtaggcaaatggtctgagccttggatggagattgaagtcctgactttagctgggaaatcttggttaagagtctttctgtaccttagtttccctaagtgagaataagagagttggacaagacgaatgtatctccaggttccaatttttctgagaatggttgatagagaagctgctctctccttaaaatgcatggactcaatggcttgaagatattccccatggggaaccattgccacggaggccttgcatgcaagaagtttgggtggggacagtgaggaactgaaacacaagcaccttccaccaattattgctgtgaagaacctgagcctgaagaagctccatctaattttttccccagagttccagattttagggtgcaatcatccagcctatacatgtggctcatagttcaaaaaattaaaagcaaaaccagaactctccagtaggaatggagaaaacctatctgtaggctgaactggctcctttgtcttaggaggcactggtcaggggaaaaaagctgtcttccagacccctcctttctgggtggctactgtggaatcaacggggtcactggctgtaaatcagtaagtcatagctccaaacagcaccaacttcaggatgatggtggaagctctgtccctataggagccaccgttgccagctgtcacatcccaacctaggtcaaatatggcggaatattgatttcgtctctaactccctgtatctcttacaaaggtaaagcaggtagcgaagccaccttgcttccctggtctttgcctagtggctggcaatgtttacaagtgtaccttactttatatcaacatgaatttgtgaaaaagctgtatgtcaatggattttttaaaaattaaaaatgtattttgaatgaccctaagggagctggctctttaaaagcatcctaaggtaaagattttttttaaatgaagaatctttttataaagcaatgaacaatctctgattttataaatcttaattttcctatgggttttcttaaagtgaaatacaattataagaatacattttaagggtaacattaacaacctagaacccagtttgggttactaaaaataaaatgtcagtattatcaattgataactaccacagttttatactctgcaagtgtgtactgcatgatggttaaggaaaaacaaatttattttagaacaaagcaaaccagagtttaaagatcagggatttccttctttccccagtgctaattttcccagtgttaattttattatatctttaggtaagggtcttaaccaactgatgcctcagtttcttccacagagaatagttagagggatgctgtcatgaactaagggaagggcactgaatttttttttgccaatatcaaaagtgacatttccccatgatgttcaagactcaccaggtttctctctccacctgtacctacacccagctagatcttgtcgttaaagatgtatggagggaagaggtttcaatccttccctccttggcaacctacattgttaagtgactcaaagtcatgtgatttttggtggacaactggaatcctccttcttgtaaaacacattgaaaaacagctcatctctcctgttaggcttaacccttgagatttgagacaaagctaataatcccctttggttcacatctcacagtaaccaggagaacctatggttcatttgccaagtgattaaaaaaaaagatggaggagggtgtctctgaattttaatggaaacactgccaatagcatggtgggtaacctagggcaagacagactttttcttcctgaaatcactcttctaaagctgagaccggaagaggaaccttgcagaagtgcactgtgaccacagttcttggcatgaaagataaacaatttgcagtctcatgccaaaaagtatttccttgcatttacattcattacttagaatgatcacattattcatttttttccccagcacagaaatttgcattttgcacagaatttgcctggtgcagcagatctttatagttatggaaactgtcatcattatcggaatgtgctgctgctcaactccccagacataatttaatatggtgaggagaatatgacctgcctggctctatgggtgatcatatttctactgctgcagcaagctgggcttgtgtatttttcctcacttcagttgttcttcccatagttcatgtagggaggcactttggcttttgaaacactacatttctcaatatttaagcacaatttattgtccttatttttcagaacccattaaatataagggtcagaacctagaaaatcttatgtgctggatttctaccctgtatgattcttttcatccatgctttgcacttacgtaggaatatacataatttggtctgaagaagtataggaacagttgagcacattacttcaccactggaagaataggaaccagggaaaaacatcagcctctgccacttggagcactagaggatgacggaatgtcttgtatatgcggtcaactgttcaggatttactactcaattggttgttcacaatcagggaaatgattggcttcttggttgtttgttgaactttctttctttatatggttaaattattttgttttgataaaaataaaacttaaaatgcaaatgtctcacgtgatttgttaacattttaaccaaaacccctgcaaatcatatgctttatgaattggacatctgattattcctaatcattgacccaatgcctcgttggccgtattggtatcccattccactcaacaaagggattaggtcatgtcaaatgatctcactttcttgtggtgcttccttttcacacatagctcgtttgtcattatctgccatattttatagtctgtaacttaggaatctggttttagattcttaaatgtagcgaaactctgaagccacaggagggcacgaaccacagtgcaataatccagaatcttttccccttggatttgatgttttctggacatttagcattattcattaacagagaaaacatccttaaatcaaaatcatagcttcttatgaaggtgatttatgtactccttgcaagaataagtagacttacttttacagcccaacacaatgttattagtctatttacatacctcttgaagacacttgaagtcagtggggcacaattcattggagggaaaagtgggatcgaggatatggaaggaacaggtatactaattgatggcagttaatagcttttttccccaaactcatcaaactgtaatcgccgttattataattaatctatttgttccaaacttcagtcatttgagaaccatcttaatgctttttgccatatgtatcaagatgccacatgtgggtatattttttacttaatacttttatttaaattatctctgtgttaaagaagcaattattgccctaagcaataatgtctatgaaaacttgttgaattttcgagttaagtatattttcaaatatgcattaaatgtagtaaaactattaaaaattgttcatgtgccagttaaataccatcttcatattaccagtggtctacccagtgcacttggggaaacatcgagctaacctaaacagtatgtttgctgttaggttttctagttattctggcttctatgaagcagagctctgtctccattttttctccaagacaatagaactggtgaccacaaacagaattgtgggattattgggtaagtttctttggtcaaactgtagagttaaataactgacatttcaaatcaaaggattttggtctcaaaggaataatcacataatgttttgttgcataaatatgttttttgtttgtttgtttgttttggtgttttgagtgttggctgattagtcggtgagtacagaatgatgtataggaatgcatagttaggaattcatgcccaaccagaagcaccgacataagttctgctgaaataactgcttccatacttctaaatgtgagggaaatggatttggctgtactaagaaccacagagagcaactttttaagtctccttagtgtcagcttgttgatctttgggctgtgtatgcagaaagaattgctcagtggcatctgtgacctttgtttccagcggtgacagacacagtctgccttcagtttccttcagtttctgccagaggcaaattcaacagcctctaccattgagcatcttgggattagtccatggccatttcagcccagaaataggtgaattatttttccgtgtgaggtatgagtgaatggatatctcattcctattgggaatgagaggtttgtacctgcagcacctgggaaagagtggcccagttctgtctgtggccacagagatctggttgccttctgtgtgtatattgtgtgcaatggggtattaatgcagcatgattgaggcttcttggctccatcatacatgaaaggccagatatctagccttgctttttctacatgatgtgtaaaccacaaatgcgaatactctagttggacatatttgcctgaaggaaccctccttacatacatacacacacacacacacacacacacacacacacacacacacacactgaacatattgaaaacttcctcaaaagtcctccccttgttaaaataactgggtggactagggccgatgagttaggaaatgagatgactatgtatatggcccaaaagggagctccctggaggcagagcccatggtgtctttatcttggttttcttagctgctggaagagtgcctggctcatagcaggcattagtgcacttttgctgagtaaacaaatgaaaatggctcaccgagagtaaatagggaagaaagaaagagtctaagataaataatatagcccaaccccttccttcttttttttttttttttttttttgagatggagtctcactctgttgccccagactggagtgcagtggtgtgatcttggctcactgcaacctccacctccctggttcaagcaattcttctgcctcaacctcccaagtagctgagattacaggtgcacgccaccacaccgggctaatttttgtattttcagtagagacggggtttcaccatgtccttaaaccaaaatcatagcttcttatgaaggtgatttatgtactccttgcaggaataggtagacttacagcccaacacaatattattagtctatttacatacctcttgaagacacttgaagtcagtggggcacaattcgttggagggaaaagtgggattgaggatacggaaggaacagatttactaattgatggctcttaatagctttttttccaaactcatcaaactgtaatcgccattattataattaatctatttgttccaaacttcagtcatttgagaaccatcttaatgctttttgccctatgcatcaagatgccacatgtgggtatgttatttacttaatacttttatttaagttatctctgttaaagaagcaattattgctctaagcaataatgtctatgaaaacttgctgaattttcgagttattttcaaatatgcattaaaatgtagtaaaactatcaaaaattgttcatgtgccagttaaatatcatcttcaaattaccagtggtctacccagtgcactcggggaaccatcaagctaacctaaacggtgtatttgctgttaggttccctagttattctagctcctgttaagcagagctctgtctccattttttctccaagacaatagaactaatgaccacagatggaattgtgggtttcttggataagtttctttggtcaaactgtacagttaaataattgacatttcaaatcaaaggattttggtctcaaaggaataatcacataatgtttcggccaggttggtcttgaactcctgacctgaagtgatgcatccacctcggcctcccaaggtgctgggattacaggcgtgagccaccacacctggccgcaacccctttctttatgaagatccatctcattatcagagatgaacaatggcattattgatccatttcagaatttagcaactatttcccattacttactccatcttgttaattcagccaatagttgttgagtgcttaagtctgtagtaggcacatgaggacacaggagtgaaaaagacatacaggatccatggagcttttatctgggggccggggaggaagtgtcatttcaggagtcaggcagacacgtatgtaaactacataatatcagatggtgctaagggtgaagaacgtgaagggaatgttagaaagtgtatctttaccctaattcaaaacaatgcaaataaaatgtttaaaaattgtcctcagtagagaagaagaaatcattctgtgccttaagatgtggctcctcctctgtttcatgccagcagcctcatttctccttacgtggagcacagaagcttgaaagatgcttcccattagtcttgtgcttatagtttttattatcctcctggtagcttcaatccatgtcagtgtcttctctacctgagcatcgtaacttgggactacttttgctaaaaggtaatttccaggcacctcagcacaaaggaaatgaaggcatctttgatcccacatagcaaagaaacccaggtcgacactatttcagacctaacttccttgggaggaaacatcaaatatttgatgactgatgttgtcattcccaaattctttttctcaagaaagattaagatatcatgctttaaggcagtggttctcagagggggcaattttatttcccaggcatctgtatgcagagggcagggattctgctcaacgtcctgcagtgcgtaacacaaggcagttcccataacaaagatgtatccagtctatagtgccagaggtgctgaggttgagaagctctggtctcaggagttagggtgacagtgtagtgctggccccagaaacagctcagccctcatgctgacgatgagactggagtggagagaaagacgtaccctggcaggaccagaggcagagtccagggcccacagtccggtatttcttcacagctgcattaggacatgtttctagagcctacacacagcaggacattaactgatgaaaatttaaaccccaaaatcatccccctgccctgctccattccacctcgaggagaaagagccaggagaaaggatgacacgtctatgggaatagatgctgtttattgctttaccatccccaagcacacttgaacactgagtagacactaaggaaatatttacatagggaaggataggattttgctgtgaaagtagatgcaacccaaacgctctacaaacttctatagccaactggaatgaaaaagaatgaacaccaatgctgggcatcaagttgagaaaatcgagagtatcggtttgctccttcttccttttaggggaaatcaaggaccagagggttttgcccaagcttgagtgagaggcaaagtggtgactgacaccaggacttcacccctaaactccaacatttttgccatgacaccaccaccttctgcttccaaaattttccattatgctctactgtctttcctagaagtggaaagaaggacatttttgtcaagattttctgcatcagggtttgaaaattttgatgactttttggttaactgaaaattacccagaaaatcaaattatctagactgctcatcccccaaatgttctagttaatcaaggtttgattgtgtttgttttgcaaaaagaaaacttctctcctaagacatttagactcaaatagatgtgcccggtgcttatgtggtctcataatttatgcacttgagttgctgttccgtgggcaatttggcagggatcacaggcatagacaaagaagatgttaacagcaaaaaagacatcaccagaaagcctttggaagacaaacacttcacatcttcaattacaagacaacctgatgcagaaagagactaaattaatttaaaaacctcctgcacaaagaaaataatggaaaaatacatcacaagtagttatcccttttgtgctaaaaacaagtgattcggagaaaataactgcatggggctgaatgtgttagtcttataatcttctagttttaaattcttaggggagaaacagagaataagaaaaaagaagctttcattgttgcaacaaacatttattggatatttagtgtattgccaggcaccaggctacactttctgtgactttttctactcttaaaatttctttcaatcatgtgaaagaaacttctagatgtctcattactgattccaacagtggctctagaaaggccatttttttctgaggtttttgcaaaaactgttttggctcaacttagaagtgcagctgggaatatcacttggtgttattccccctgggagcctgagttctctgcgactggtttatcctaaggtttgggggccacccatttgcaaggagagggccttagattactagagattatgaatatttcaggttgagttctctgggaagtaggctctgaaatggagctcggtgtgccaggggtttattagggagttaccatggacaaccacatctgtgtagaggaggaggaaatggatacaggcaacagcagccttggccaacccatgggatgctctgcagctagaatgggcctttaaagttggctagaccaggactttagactcctgcattcatcagtcactggatgtgggctgcctggggctacctgagaaagttgtgaccttgagggaggcagctctttgcaactgaagcaatctctgaagggacagattgctgaaggctgcttgctgacaatctttcactaaaggggctctgggtggcatatcatagcattcactactgtgaggctccattgagaactgacctgccttccttccctccttccttccttctttccttctttccttccttccttccttccttccttcctttcctccttcctttcttcctccctccctccctcttttccttgcttcttttcttactttctttcctccattcttcctttcttccttcctcccttcattccttccctccttctttccttccttccattctccctccctccttttcttccttattttcttcctttctttcctccactcttcctttcttccttccttcctcccttcattccttctctccttctttccttccttcccttctcctttcttccttccttccttccttcctccctcccttccctccttctttcttccttccttccttctttcttttgttccatccatgcatccaacatgtatttattttgtgtctgccatctgccaggcacaacctgatggagaagatgtcattaaacaaaatattatacattatttatttacaacttgatgcatactagaaagagaccacaccaagtgagatgagagaagataattgggggaaccaggaaccaacagaatcagggaatgtttaggctgaactctgaggaatgaattaggatgaaaaagaaatgggttttccaggtggagggagctttgagttggaggaattggcagcacaatgggggtggcccagggatagtggggaggggagagaaggaagagatgagacaagatctggggattgcacaggcagagctcaggagtttcatcctaaacactgggaccaaaaaatctatactgtgtctggagatctaggaatgaggttctgctgggaccagaaagctagaagttagtttaaaattgaaatgcacgctcctacctacaaggtttatattattcttgaaaatgggagctaactaaaattaaaatagcttcattcagtgtgagctgcacaatattccacacagactcattgggtttttgtctcagtatcccattttcctgagctttgtaattctcaaacctcatctccatggaataatccaaactgtgaaatgaaacacttacagggccagtcaaccacaagatttgagaactgcagtccattaacccttggatgaaggagtagatgacttgaatcatcttgtaatttttgccttcctgtaggtgaaaagataaaaaaagtctcaagaccacatccagatgagtccaaatacctgctgaaaactgttgggtctatggaatttacagagaaagaagtttctcttctgacttacttagaaacagaattttattttttcttatttttttcaaatagataagatggtaaattttatgttatatgaatatatgtgaatgtatatgaacatatatataatatatattttaccattttatccactcttaagcatatagttcagtgatattaagtatattcatatcattgcaaaaccatccatctccagaactcttttcatcctgcaaaactgaagctttgtaatcatttaaacaactccccaatccgtcctttcaggaagagttgacctccctctcctttcaggaaggaggggttggggagttgtttaaattatttccctggaaacccctattctactttctgtcactaagaatttgacaactctactccctcatgtaaatggcatcatatagaatttgtctttttgtgactggattatttcacttaacataatgttctcaaggttcatccatgttgtagcatatgtcagaacttcctctcttttaaaaattgaataatataccattgtgtgtatatactgcattttaccattcatctgttgatggacaattgggttgatcttcattttcatgattgtgagtaatgctgtgaacatggatgtacaaatatcttttcactttcaatctatttgtgtctttggatctaaagtgagtcttttgtaggcaacatgtagatagatcatgtttttaatgcactttgtcaatctctttgattggaatgtttatccatttacatttaaagtaattaccaataaaatctaccattttgtgatttgttttctatatgccttatagctttttttgtccctgatttcctgcattactatctcttttgtgttgaggtatatatatatatatatatatatatatatgtatatatattttatacagagggtctccctctgttacccgggctagaatgcagtggtgcaatcataactcattacagcctcaatctcctgggctcaagctatcttctcacctcagcctcctgagtagctggtaccccaggcatgtaccaccacacccacctatttttttatttaatttttttttttgtactggaagtgtctccctgtgttgcccaggctggtctcgagctcctcttgccttggcctcaaagtgctgggattacaggctggagccactgcaccccacctgtgttggttttttgcagtgaaatgttttaattcccttcttattttctattttttttttttaaatttctgtttccaacttttacttcagattcaggcgatacatgtgcaggtttgttacatgagtaaattgtgtgtcatgggggtttggtgtacagattattttgtcacccaggtaatgagcagagtacttgataggtagttttttgatttgcaccctccttccactctccactctcaagtaaaccctggtgtctattgttcctttttttgtgtccgtgtggactcagtgtttagctcccacttataagtgagagcatgtagtatttggttttctgtttctgtgttaatttgcttagggtaatggcctccagctccacctgtattgccgcaaaggacatgatttcactcttttctacagctgtgtagtatttcatggtgtatatgtaccacatattttttatccagtctactgttgatgggcatctaggttgattccatgtctttgctactgtgattcatgctgtgatgaacatatgcatgcatgtgtctttatggtggaatgatttatattcctttgggtatacacccagtagtgggattgctgggtcaagtggtagttttgttttaagttctttgagaaatttccagactgtttgaggaagagaatttaaaggacttgggatctgatacaattttagaaactttgattcatatttggtgtttctccctgccactctctactcccatcttgttgtctctcactcgctgttcattccgagagaacagtggaggaacatttgaaaaacacacctcttccgtcttgaggaagaacaggctgtaacgactttgcaaccttgcttgggcttcactcggaactcctcacctgcttgggctgctttattttgttcatcagttgcggtccttatttaacataaagtttgaaaagcttaaacttttcaattagtagctgagctctcccccatagagatcatccagttaaaaacccaattcctgggttggtgtctacgagttgtcttttatttggttcttatgaaaaaggtccatatccaagaaggagcacatcagggaaaagcacctcaaaatgtcctgtcctgaaagtgtcttcagaagataacatttcaggcttggagcctgggaacagaaggtgcctattggtctttaattaaggaaactgttgcaaatgaagggcatttaacatcttaaaccaccagtggctcaaaggcagcatgaagcccgtgggtaacaaagatgcatttgttgtcccagctgtcctggtacctgcattggcctatacagctgacctacagctaaatgcttcccagcagggcagattataagtgatcttggactccctgggctgtgacaactcaattttcacaagtggcaaagaaagtcaagccaccgtcccctcccgtgcaacacatctgccacaataacagagctggagaggaagcagtcctctgtcaagagagacccctagacatggggacatgcaaggaatgctgaagaatcagaatggcattgtgcagatttcattactattttatctgggggagaaagagcctataaggagcaggaaagaaaacccctacagattgtgctctgattttataaccagattgttggaaattactgacagattgaataaaataatatgctttggagcaggagggaacataaaggtggaaatttaattgacttctatcctaaacctaggagctagggggtaggggaaggtatattattaatcaccactgtggtcacgcctggtggtttcatgtgcagtgagaggaaatgtagctttcaattacatacatatgaatttcaaatgactacctggtgcaccagagaggagaaagcgtgcagaccaggagctgtaccccatgtgtgtatgcacttgagcagaaccacactaccctgtaaaaaatgcaattagagaacgggggggtgagtgccatgggtggggggtaaagccgtaatctgtgagggccccaccttatctgttctctttgaagcacatgttctttttcttcctgcaaagtgcttgcaatagccctggcctgaatggatttcagatctgccttgaatatgaaatacctctggatgcattcaaccattttctaccctgaaagtcagagggacaaaaggtggattgtgtgtggccttaaatgatatttcaggagttcactaaatgtcaagataagattaggggtagcctaggaagggaattctcctaattaatgggaattctttagcatacagtgttgcaagatcctcctttgttaagcttccagagttttttcctctagtgttcaaacaaaagacaagatttttgtgttggggttgttgtaagaattattgaggtttttctttaacaagaaatacttttactttcacggagaagagacccccccccccaaaattaaaaaaaaaaaaactttgtcttgcttgtttgcgtattgaatagctactgtgagtccagcctgtgctggacatcggagtcctagaggtcaataaagacatgtccccggtctcagaaagtgtatttcagtcccagtgtaggcacaaaataaggtctgctgaattatattgcctaagctggaactctagcacgttcattgattcattcaacaaacctttcaaaggcctcatataggcagactaatagtcaactagccaccagattaaaaaaaaaaaggattgaattagaatcaattctatcaccggattaaaaaaaaggattgaattagaatcaattctatctgtgactaaacacgcaggctttttactcagacagacctggacttgagtttggctctgctgtgaatctgtttggctttgcaatttctccatgcctcagtttttccttctatacaatggggacaggaagaaccatctcccaggtttattgcattaaatgaaatactaatgcctactgtttagtactgttctgagtgctttgcatctactgttaaatatgaatgacttatttcctcagctgcttctgattgaacctggagtgtttattcatgatttgggggcatacggctctcggataccttaaaagtgattgagaacctcaaagagttcctgttacacagtctctattacaaaatagctacccatatttattgtattataaattaaaatggaaagcagttgaaaccacttgttaattcattaaaatataacaataataaacccattacatgttttaaaataaaaaacatttttcagaacaaggatttagtaaaaacagggcattgttttccacgttctgcatatcttctttcatgtctgttgtaaatcacatttcatgtagtctctcaaaaactccgcggtgagcttctaagagaatctgagtataaagggccaatatcttagcattattgtgacgatcatgagccaaactccccgacagggtctgggggacctcaggtcacaccttgagcagccctgtattaagtcacttgctcctcaacacaaccttccagggtaagtgctattttcattcccatttcatagatgaggaaataaaggcacaaacgtttaaggagcttgcccaaggctacgtcactaagagtagcagagctggcgttgagacccagctgcttgtcctcagggtctgtgtccccaccaccacaccatggttcacgcagagaacccagaacagtgctggccgcaggaggctctaggccaacgtgagcagctggacgtccttctgtgatgaaggtgatatcaccccattctccgatggtcagttcacttcctaccgaaagcactggcatagctctttgaaatccatgtacagggctttggaaatagccactcataatctgaacatttcttcgattgcctgagtgttcgttctaaagcatctacagggcctgcagccactcacagaggaagactatgtctgtctgatcacctagaaaccattagaatcccccggctatcagggcagctctcctcaccttgtggtgaggccaaaccatcatgcacgtttgcagacaacaaagaaagcgggtacattgaagggagaatgtggaaaatataacttcagcgtagacctctcctgctttatctcatgtgaccaaaaaggttgggagttgattgaaatgacttgcatctgggactacaccaggaggccgagcagacacaggagtgtttctcactcttaaaaaaaaagtccatataccatttactcttttcagctcaaaatactccacagactttgcaacttacctcttcccatttgccctttaaaaagggagtggggggagagaaaagggagaagtgggggaaagccacattagaattcatgggaagaaatgagattgtttttaagacacaggcacctggatttctttgtttaattagcatcagtgaattattaattcagcgcaaaaaagcatagctctttgtcatataaaaaatcatcaataccacaagagaccctcacaaaccaggatgatgataacttacttatatttgcacagtgctttgcaatttacaaggccctgttctgtacttcacggatttaactctgttaactgtgtggaatggagtttttgcccgggctggagccagcaggacagtacagagattttacttcctcaccatcacgccccaaattatggagaaacactccagatttaatcagaagtgcctgggacaagaagtcattaatattcaacaatttttaaaattgcattcccaaactatgtcaaactttttgagaattcaccttgaagaatcaagaggtgcaggcccagctctggggagtgatccaagcagggtcttctgtgagcttcgttcttttccttaattggatggagctattcactacggtgaggtgacccatctgttctgatttgcttaggacttccccacttttagcactgaaagtccagtgtcctgggatcccccacttccaagtcccaggcaaaccaggatgattggtcatcctacgtgcgacaaatgcctgaaagcatcgcatactccgagtctacacccctcttttcttcatctccgtggtttttctcctggcagagttgcttggagcttcacatttgacaagtgcatttggttttgctggccagggctggccttacagcctaacccaggacccgtgcacctccagtcttcatttcccagctctgtcagagcagtggggcacactcatcctctttgggggatatccccttagtgtgtcagtccctaccagagccaaggggcagtagaggctcttgttcctcctctgcctccctgtggcaatggctcaaccgcctgtctttgcttggccaatcttatactgtcagtgaggacttggaatcttgggagtgacaggtaaagactttgggaccactggagcctgctcgtgacatgaaggtggagttctgagtgtacagcagaagagccggctgcggggcccagattcgtggtctctgtggcgactcagcttccctggaactggcttgctttctgagtccaatgcacgaacatttttgtcagttctgtgagctcattgatgtcctgctgatccattccttcaatgcttaagcaagtcggagtcagttctgatggctgcaacttagaaccctgccagctatgctgggtcaagaatggtaatattatccgtctccaccaactagttttatctatcaatttatctatccacccatctatccatccaaccagtcatccatccttctatccctattaatatcctactccagtcccttttccctctgccccactgaccaccatacagatgcgttaatcatttgttttcatttttgcaaaatgtgtattattgctttgtatgcatatacacatagatatacaaatattaagtgtatctcttgatggacctcacatatgtctatactcacagccaccaacaagatcaggatacagaagacatccagtacccagaaaggtctctcatgccccatcagtacattactatctcccccatccagaagtaaccactttctgacgtctatcaccataaataaattatgggcatgtattttttatgtacatacatggtcttgttatatatcttgcctgtttcttcatatttttcaagccttatgttgttaaaacccgatgtgttgctaggttttcaccttggcaactcctgacttctaactcatgtgtactactcagcaggcaagcttcacctgcttagcctcgtccatcccccaagctgcctccacggctggtcatggcgttgtggtcatctccggagtcctcatgcgtgggagtctgctggatttctcagtttgccgacactccagaaggtcaagttttaaacctgggagatgtgggggagggagattaatgggtgagccttttttttgtattacgtccttgatgtgtttgctgaatcttcagtacctcccagacaagggtggtgtggccacattctggatatagaatgctcctcccagccttctatctgatgcatggcgcctgccacttcctcttaggcgtgctgcaggatgacactagtgagccacaagaaggtcaagtgtgttcactggtccttcctgtgaggggctgctcatccttcctgacacaaagcagcttagaaatcctaagaaaagtaaagaaagccgcagagaggaaacaaaagtgagggagagtaaagccaagtttgcgtgtaaaatctttcatgttttctcattatgtgtcttctggctgggaacatggttctcacagcccaggagggcacaacttgcttttatttggcttcagaggcatccagtttgtgaaagtttatgggagcattgcagaaatgtgttttctctgtggagccaaaagtttgtggacaaaatagaccaaaagacaaagaccgtggaagtgtctgacccaccccaatggagccgacttgcttaggaaacagaaaatccttctcatcctgtgcaattttaggaagatcaggaaggctgtactgaggaggatttcagagctgaagctgatacaaaaagaaaataaatgaatgaaagaaaataatcactgtcatctgagtacagcatgaaaaatatcaacatgaccctgatttcataactcaaaccagatgaaaaaaaaacttcacacccaaccccataccaattcctctgatttctttctttttttttggtttcttgagacagagtctcactctgtctcccaggctggagtgcagtggtgtgtctcggctcactgcaacctccgcttcccgagttcaagaattctcctgcttcagcctcccaagtagctgggattacaggcacctgccaccatgcccagctaatttttgtatgtttagtagagacagggtttcgccatgttggccaggctggtctctagctcctgacctcaagtgatccacccatgtcagcctcccaaagtgctgggattacaggtgcgagccaccgcgcctggccaattcctctgatttctaatcaatttctgtggaggtggcatttacagagttcatggggatggaggggactgtgacagtgcaaccagctccaaggcacacagctgccaggagggacagtgggggtgatgggcccgggctccagagttaggcaggaagggagccgagtctgtatttttccatgtatcatctacgtgattttgggaaaattacctaccttcccagaccttcaattctacatctgtaaaatggggttataattgcaggtccttcacagagttaaacactcatgaaattctagaagcaaagaggcatcagagagcctgacacgctgaggtgcccactgaatgtgagctctgtgttcacaggacaagctacaaagtcccagtgcggagtgaccacggaaaccctgggtcaaggtgagtgatgctggagccacttgaggtctgtccccagggaggtactgcacattttccctttcaggtaatatggccatccacttctagacacttgtcctacagaaacaagcacgcggagacttttgtaggaggatgcagcactgtttgtaacagtgactgagtgggaataacctaaacgtccatccaaaagtcagtgttagataagccattgtgtgttcattcaatggatactctgcagtgtccaaaagaacaagtaaacccataagtatggcacggaagggtgactgggtccaaaaataaaagtgtatacaagtattaatgagatgtctgcatttttttttttgagacaaagtcttgctctattgcccagaggctggagtgcagtggcgccatcacagctcactgcagcctcgacctcctaggctcaagtgatcctcccacctcagcctcctgagtggctgggaccacaggtgtgcaccaccatgcccagctaattaaaaaaattttttttttgtagggatggagtcttgctatgttgcccaggctggtctcaaactcctaggctcaagtgatccttccacctcatcctcccaaattgttgggattacaggtgtgagccactgtgcccggcccagatatttgcatttttgtagaaataaggaagaaacaatactgtgtttaagttgagtatagaagaacatagtgagaagaatgtttatcaagcagctggtggtgattttctgggaagaaggtggtatcctaagtaacatggtcatgtaattggtccacatggggtactttgggaaatgaaagaggcaggcacttcgctaaagctgtgcgatgggtactgacctgcagccacgcaggcaatctgggagacatcatggaggacttaccctttgttcgcagagcactcaggactcttgtttgttagtggcaaatccaagtcaaatatgcttggttcatattccctttccctgagtccagcattcactgggactgtgaataagctgggactggacaggggaggtgggaccttttttatgagaacctcagagatgagagccagctcatgggggatgcagtgttgaccaagttgctgtgggaggcagggagaacagatgttgggaaggtcaaacacagagacgtctgccttgcagtccactgtgtatctggatagcatgcgaatgtataaggctgaatgttatggggaaatctagctggtagaggtgagcactgggacaaaggggacctttcgtgaagtccctgtgtgtgatgccggaggcatctgaggacttggggaaccctcccccccgcccactatgagaaatgcaacagcattatcaaagagaggagaagaaagggaggaagatgggccagggatcttgaaaggatgtggttttttccctgcactgggtgtgcgaaggaactgtgcttgaagggccagcagtgggaatgtgtgagcatgtggtgccctggatagtttgctttccttgattggaagcagctgtgggcctttgacttttgagagggacagaaagtttggtgtctttatggtgttagaggttatgcccgaagatttcctgccttctgggccccactgaattggaaccatttttcatcccactcagacatccaagacttacagggttctaaagaagtccccgaatgcccctctaaatcaatctccagacgttttctccctgggagtgttcaaacgattcaattatggtgtgaaactttcatagccagacctcacaagctccttccctctctcccctcccagcgatttgggtcactcatgattctgagcagagaaactatcccttggaaatctttcatgatctaattctcaggggccctggtgtaaacaggagccttaaagcagggtcccagaagatactagaatgatcatcagcttaggagacaatgattctgaactcacctggaccgtttccttacctgtcaattgggaaaaacaatagtagctgccttagaaggttattttttcttttttttaacaaatgtttttacttaaatacatttttaattttaaagtcactttagagttacagaaaagttgcaaagaaagtacagggagttcctgtaagcctctcacacaggttcttctcttgttgtatatatgtcatcttacatttctgtagtgcgtctgccacagctgcaaagctaacatcggcacattactattaactgaactccatggctaattcaaactgcactcattttttcctaatgtccctctctggtccagggtcccatccaggacaccaccttacatttagttttcttcttaggcctttttgatctgtgacaattttctcagacttgtcttggtcttgatgacgttgacagttgtttgtttgtttgtttgtttgtttgtttgtttttgaggtggagtgttgctctgttgcctgggctggagtgcagtggtgtgatcttggctcactgcaacttctgcctcccgggctcaagctattctcctggctcagcctcccgagtaactggcattacggacacctgccaccacgcctggctaatttttgtatttttagtagagacagggtttctccatggtggccaggctggtctcaaactcctgacctcaagtcatctacctgccttggcctcccaaagtgctgggattcagatgtgagccactgtgcccggcctacattgacagttttaaaaggtatagtcaggtgttttgtggaatgtccctcaatttgggtttttgcaagatgttttcctcgtattagactgagcttattgattttggggaggaagatgtcagaagggaagtgtgcttctcattagcctatcagaggtccaggctgtcaatggtaatgttggccttgatcatataggattatattgagaattcagtgacatcacccaagtaaggtgcttagggcacacagcaaacccatggttagacaaatgggttgagtgagtggttattgaggattttgactttgtcaggtaatgtgtcgatttcagacaaagaagaatcagacctgattcctgtcttcaaggacccttcggcctgaggtgtcgatgcatccttcatctcccatccagtgaccttgatcacctttgctttgttcagctgctttccagcggtcacttcctgcttggagttagggctatagctgttggcaactggggtgtgtagaaaaccagaaagcgaagaactgtggcaatttctggctggggatgaaaagcccagtaaacaaagggacagagtctttcagagagtgatggctcagcacgcagcggggaaagtgaaccacaagaagggaggagattctcaggggagcaatgtggcccaaacagacatctgctgtggatcttttaagaccttcctatgtaatgtggcaggatcccaccaaacgccaattcttggttttcttgtatggacaatgaggacagtgacatttgactggcttttctcagaaagttctactcaacctaagttgatgtccaagacctttgggtacacacaggtgcaaagccaaagccccagccctcaagaagctcacagtctcagaatgttgcaaggctccaaaggcccaacgtatggccatggaagtcccgcggccactgagtggctggctgtgcagaacgaggaaaaacctccttcattttttacaagaaataggtgctttttaaaggacaagcctccaaccaagccaacaacatggtcagcgtgtctcctcagaactcctatgaatcatgtcctcatgcttttccattgaaatctcttaggaaacagctcagcaatttgcttcaattctgcaaatttcatactttcaaagaaggcatctaaagaattcctgatgcttgttttgttgggttcttttgctccaatgaacttctggttgaagtccaatggtttctgtggctgaggaagaagcagtgatgtgtatgtgtgcacattgccttttgctcttttcaatgattggaacatatttagtcacacccttctaatcagtaaagagcccacagcacatttagggctgtaggtgaaccacggagacagggaaaaccagttttgttttttttacttttgaggaaaagtggaagatgctagcttagcactacgcttggcctgatctcttaggacttatagatgctccaaatcttaccaaagagcctctcagcactgtgctgcccagcagggctgtatgcaacatctccaagtggcaccatattgcacagtgcatgtgctcaagctccagaagttttaaatttatgctgtttacaaattgcatttatgttagccactgttttccatggaaaagttcaaaccccagaggaacattaaacagtcttacagcaaatctacaagataatagaaaatcagagggctctacgctcttttttcctcctcctccattgatgagaaacacaagttctgcttggagaaggcagatggcctcaaaaggataacacacatgaaaaggtgcaaacctgagctttcatttgtagacatgttggtgcatctgaacagaatccatgtgtggaaccaggtatacttaactcattaaaggttcctgccatgcgtattagttactagggccaatggattccccgttctgtctgagcttatgagttgggttttgtcctttgtaagccacggtctcctctgagtattatacacagtgcttggcgtagaaagggttgctcaggaaggtttgttgtctggcccgctgaatgctctaaaatgcacagtccactggacaagggttttccaaccttggcatattgacatcagggccagatctttctttataggggctgtcctgtgtgttgcaggatggtgagccgggtccctgggctctaccctttagatcgcagcagccagcaacactccctccatattagttgtgaccatcaaaaatgtttgcagacattggtaagcgttccctgggggtcaaatcatccccagctgagtaccactgatgtacataaatctacaattctaattttgaatgatttattgaccatcttctataaaaaagattggattggatgagaacaccaaaacatgaaataagatgaaatgaaagtcaagattttgctgcccgaactacttatgatttagaagagatttgccatcctcaaatgctgaagtggagccaagccatgtgcattccaggggcttctgggagataaattggtttcactcatccaaagccatcagtcaccattcacccacttttctgtttggagttatttaatttcttcttgaatgcttcccatcttgctcaaatttgcaccctgtctctgtccttctctctcttcaaaatgaaggaggttgaagtaggtagaagtttgctcatcaccctaatcgcacttatttatttagaacagcaaaatcctctcgagatgacgaatttgctttctgccaaagttatgcagctgactgtttataacagatcctgtaattaattggattttgtcactagaatgcatgcttttttccctttgctttgcaggtgtgaaaatctcagaaatggccttgcaaggttgtagcttccagccacgttagccagaggggaccagaccttcatcaccttcattttttaattggcttttgatgttggacataatttcttaatgacacagccatctcctctgttgaatctgcacagctttgaatgttcattacgctacaaagttggtctcagcttattttggaattattgtttctccaagcttacttagacaacctctggcctcctttttgggttatgtaattatttcctcatgcagcccatagcttgcttccccacatgtctaaggctactgctaaccatgagatcttattcataactctattgtgagacagaacaaaggcacccagtctacataacctcaccagaggtaaaaagcaactctatccttacccagcctttcccacaaggcttttctgtttgccagaagtgtcggcattcttgactccattggggaaatgtacctatagcaaaaaacaaatctaaaaatcgcataactgactgcactcgttctattttgtcttaaattttattaaccctgctttgcccagaatttttttaatctcttgaggtaagtttccaatcatctctcctccctccttcctaccccgaacacacaaactttggggataagggaaggagggctgtatcaagagaaaatgtcaggcaacaagaggaggtgatcatctatccctcagtgccacatacaaagactgattttaaattaattagccaatgcaggaaaacagcaacaacaacaaaatccccagcaagatcaattgctcaatatgccctgtttttaaactgatttgatcaaatcagtggttgatctgaggtcctgcttagacgaacccatgtaaacatacattacaaaacagatttttcaaggaaatctaaggggctgatacacaataaatatttaagttaaaccccaaactgtgtaaatagtaaataattttgtttcctgtcactcacagctctctggaacagtttactatttaatgtatctgaacatcaaaagaatcccttaacttgaaatattttccaaaaagtcattaaataacatatttcttccaaacaaaacccaagctggaatggaaaccctcacacatatacctattggttaattaaggttaggattccctcaagagaaaagagctggtcaaaagaggttggttctgtccaaagacaagtttaaacattataattcaggtgaccccaaaggaaaggagaggacctgctagaggactctcagtcagaagttggcacagatgttttttcttctgctgcaggtgtgaaacggaatggtagtatctgcttacctttgtgcagagaccattcctcccaggacatcagcctctatgcatctattgaaccaacacgacccaagtttgcgatgttcctcccagagaaagaaagagttcagtctgtaacaaagtggcgtagtttgatccttggggtcatagccccactgcggcacctcggcttcgcatttgcgcagagaggatgctggcaatctgatacaggacttaaatgcaaaatgaatgccaccttggggtttgtgcccttccatttcataatcatgtgacctttatttcctttcttttctgttgacaattttttctaagagatttggagcatctctttcgcttgaaatttttatgacctttaaaactcctgcctccattctccctaagactgccttcagaaaagctgcagctgatcccagcacatgactcacacagcatctacctgtcacattccaagtgcctcgctgtgtcgtgggcatcaagtggcaaaatgaacaaagatcgaatgtcaggaggccctatccagggtcacatgcttggccgcacttcccctttcaagagctggtgggagaaagattttgagcagggtcaccgaagacaggtatgctctgtaggagagcaaagagaaggaagaaatgctttgccttaatgactttttcaaagactcaggatttccctggatgcctttctggctttgaactaaagtgctctgaaagatcaacttgcttggctatattgcccttggtaacttttcttggggaagacaggaagcttccccactaccctttttttaaagaaaagtattttttaaattgtggaagccaggcgggaagccagcctcctgagtagctgggattacagggacgcaccaccacactcagctatttttttatatttttagtaaagacagggtttcactatgttggccagactgatctgaactcctgacctcgtgatctgcccgtcttggcctcccaaagtgctgggattacaggcatgagccaccctgcccggctgtcattattctatttttagtcttctgaggagctgccatactgtttttcacagcagctgtaccatttgcattttcaccagtggtgctcaagtgtaccgatttctccatatcctcaccaacactggttactttctgttattttgataatagccatcctaatgggtgtgaagtggtatctcattgtggttttgatctgtttttccctaataaggagtgatgttgagcgtctggtcctgtgcttattggccattagtacatactctttggagaaaagtcttcaaatcctttgccatattttaattgagtttgcttttttgttgttgcattttggttttttacatattctggatgttaatcccttaagagataagcaatttgcaaatactttcttccagtctgtgggctgccttattactctgttgatgggtcctctgatgcacaagtttttaattttgatgaagtccaatttgcctattttttcttttgttgtctgtgcctttggtgtcaataaatcattgctaaatcctttgtcatggatttagcatggaaaaagctttctccatatgttgtcttctaagagtttcagaattgtagctcctacatttaggtctttggtcaattttgagctaatttttgtatgtggtgttagctaagggtccacttttattcttttgaatgtggatatcctgtttttccaggaccatttgttgaaaagattgtcttttcctctattgaatgggttggcatccttgttgaaaatcaatttcacatatatttgatggtttattcttgggcatgccctcaggaacttttactgtattcatgcattctttctttgaatttgccatatttttgtgttatccatgttctctgtgcctgtctcactgttccaccagattacaaacttcttgagaatggtttctagattgttttcactagtttgtgtgttgccattgcctagtggctttatttatttactggggctaatctgatcaatgtagtcaggctggctatattagcataaatgacctggcaagtgggtttgcattgatccccatttgaagcttgcccatcctgagcacgttgtaggacgattatgagtattctaatgattttgctctaccagcctccttctctagccagtgagcatcttggcagtgcctggcccattgctcacttcttaataagtgttttgagcaaacagataagcccgtggataaatagctgttgagaatgtggagtagccactggagtctgctacactcatcgggggagcgtggcccagaggggttgaatcacaggtggattctccttttcagtccccttttctggatcttctttctctttctggatctaaactttggatcacctcaggtctcagcctcagatctcttctccatccacatttatttccaggctaagcttatcctgaagctttaaatgcaatccatttgctgacaactgctgagtccaaatctccagacccaccctctctcgtaagactagtgaagccactgagcccttctgagccagtgtcctcatctgcaaacaagggatactatgatcttccttgctgctgtgtattatagatactgtgtgccaatgccgggcacctagaagtggtcagcattatttcagtttatcttattaagagtcagctgtaggaagcccctaaagactacttatattatcagatattccacaataaagaacatttggaaaaaattaaaacaagagttaaaatgtggaaatctgcatgcatggcaggcagctgaaagccaccctagactcctcaaagtgtggagggtgtatactgtttgtacttttccatgttaatctgttttcccaaagggtttgttttgttttgttttgaggcagagtttcactcttgttgcccaggctggagtgcaatggcacgatcttggctcaccacaacctccacctcccgggttcaagtgattctcctgcctcagcctcccgagtacctgggattacaggcatgcaccaccatgcatggctaatttttgtatttttagtagatatggggtttctccatgtgggtcaggctggtcttgaactcctgacctcaggtgatccgcctgcctcagcctcccaaactgccgggactacaggtgtcagccactgtgcccggtcctcccaaagggttttagtttgtcgattccttttgtcttcaaccagttgagagcagccatatcaacagaggccagagtgatttcaaactgaaaatgactgtggtgttgagctataggcctggtgatgctgcagagcaggagagccccaaaattggggcttagccctggagggttcttggcttagcccaggaaagactttaagggtgagccagtggtgttcaacaacagctttgattgaaggggccgtgcacagcagtggcagagggactgcaccttgtagagcagggctcccccataggcagtgagcttagagcaacagctcagagttctgtggtcatagttatactcacttttaattatatgcaaattaaggggtagattatgtagaaatttctaggaaagggtggcaacttctagatcactgggttgctgtcacggaaagggcgataactttcaggtgctgccaaggcaatggtaaactgacatggcacattgctgggcatgtcttacggaaagcagcttctaccctgtccctgttttagttagttctcaatttggtctggtgtccaagccccacctccacagtggagtcccatctcctacctcagtgaaaaatgagtgggttatgtaaccaacgcccggagtccatttgctgggctggtggtagtgggttggggtggtccagccaagaaaagtgtgtctaaagaatgaaggtgggatggggcagagggcccagcagctgggggaaggccctctcagcatgctgggttatggggaaggcctccaagaataactcttttcctctttttatccccagaactcttctatgggaaatggcgctttgagtttgaagtagagatgaaggttggaatagaaactagttgagcactaaaggaaaggcttttgagatatgaccttatcttgcatgtaggggctgcctactctctagctgcaaggactatggggtatgaagaattcccttcactcacacagaacttcctacattttaaagaacttccacatctttccctcttaccaagttgcccaccaaaatcctagaaggcattttgattccttttcatcagtattctcctgcctctaaacttcaatttgtgcaaaatccagttggttctgcccccaaaatattttctgaatctcagctgaccacaatgcttttttccctatcactataaccccaggttaagccatctcctattggcctacacaagcatcccacccagtttcctggcttttatcctagatcagtacaacccattctctatatgcagctagagggcccagagggcagagctgagagtcacagcaggtggggcctgggcctggaggatggagctaagaaccaaagaggcagaacctagcctagacaagggagtggaaaaccacagagtgctgttcccaagtccttgcaacttcttgaaatttgtcctgctgcatctctaatttggttggggtaagtgacccctttacttagtacaatttctcccttgtggattggaaatgtctaccctatcctatcattgtattttgcctgtcctgccacagtattttggaagcaggtagcttgctttctaggttcacagaggcacagatgaagaggaattttgtctgaggatggaccgtacaaaatgtctcacccatactgatttagatgaagacatttggcacttttgacctgatgatatttagatgagattttggacatagagttgatgctgtaatgagttgagctggtggggatgggatgttttgcacatgggacaaatatgcatttttgggagccagagagcagactctagtggactgaagtgtggtctcccacaagatatccacaggttccacctggaatctgtgaatgtgagcttatttgaaagaaaggatctttgtggatgtaattacactaagcaatgagatcattctggataggagtgggacctaaatccaatgaaaaatgttcttagaagaaaagagaaagagaaaggatggggaggagcaggccacgtgaggatggtggcagaaattagagttatgctgccctcaacctggaaccactagaacctgaaagaggccaggaaggcttctcccctggagtctctagagcaagtgcagccctgccgacaccctgatttcatattgactgtgagagaatacatttctgtttaaatgcagcaattttgtgacagtatgttatagcagccatgctaacacactccctgtcagcctaggaagggttgtcaaatgtcaagcttgattccagccctgcctggggcttcgcacttgcagtctcctttgcctggaataccttttcctcagggatgtaaatgcctggctccctcccatccttgggacctgctcaaacctcaaccacctttgaggccttcacagaccacccattgtaaacggccccccctagttactcgatgtggcctcaccctgtccaatccctttatggaaactttcagagtctgtagttttgttctaccatgttatttacctgtttattgcctctattccccaaccagaaccataagcatcacaagggctgggatcttgttccctggtgccaaaaacagtacctggctcacagatggtctttagtaaatttgctgatggaatgaaagcagggaagacctccttctttgcagagcgcatcttgccttacctttgtgtacagaggaagaaatgggctgaaaaccatcagcaagactgggacaaagctcacactctcccctccaccaccctgggggcccctgggttcttgcagggcctctgctccgtcactgggctctattctttccttttccggctgtggacttttttctagggacccagggtcccatcttgctttgtccctggctctcctgtgcccctgtcacccaccactgccctggactcttgactgtagggtccaatgaggtcctgcaggtgttatttgcccctcccccaattctggcctcagtcttgttcttccttctttcctcctctccaggggcaggctccctcagggtccagatcacctttgtcagcttcacaaagtcatggtatcaagggcctgtgttctctccaggtctgtgtagctctgtgttgggtgggccattgccaggcccctgtgtggaacccacaggtaaatgaatgaatgagtcaacaggaccaaacctgcaaatagctcagctattcacaaagcatgtgtgatgcttggaagtcatgtaaagttatgacccattgaccttccacctcctggggaatccccaagtctagccaggaggttggggagccctcaggcctctacagaaaccagagacatttcggctggccccagtagctccacgggcttgtagctgccttacaggtggtgtgccttgcttctgaacaaagacccagaggcaatggaggggaggggtggccggagaaagcctcataacatgaggcagcattgccatagggtcctttgatcccacctgcatgctcccagcctctgctcccaaggtggtgcccttgttaagttggcttcaggtggtgacaggcacacagatccccaaggcaggggattcctgctttctcctctagagaaggggctgggttcatttctatttgaaagaaaccccatctgttagaggacatcttgacaccaaccactccttgttcacatgcttgcagatgtttgctcagttcagcaaactcatttgatgagcttcagttgggtgccaacacctgccagatactgcaagaagctgaggacatgaaggtgttgatggcatgtacctgaaatcgaggggctcccctgtcgtcagcgggatgtgccagggcaaggacatgctaccacagagaagggagtgcaagacagcgatgaaatgcctggcattggcatcagatagacctcaattatggccctcacacccccatttacgtagctttatgacccgagtccaggtacttaatttgtccagacctcagttccccagatggcgacaagggattgtaagagtacctatccaatggttgacatgaagataaaatgagatcagatatggaagagcttagtgtggtgcctggcacatagtggagactcaagaaattgtggcttttaaacacaataatgggttatggttcatctacagatttgcagaaacccacctccggtgttttctatctggccatgtggaaggtaaactgcatcctgcctgtgcttgcgtcacactcaggaatcactgcgtggaaagctcctcctaagatgtccttcaagagccaaagtagaattctcagctgagagacggactgttgctagagctgcctccagactgtctctcggtctccttgcagcagacatgatacaaagtttttcactttacaaataattcctctactttgcaaaaggagtgattttttgcaaactagggttgctttagagtcaacctctagtagtgcctgacagcttctgttgctctgtagtgaacaaggagctcttgttgggggaaggaggcttcgttgggcgatgggaacagaggggtggtggcagcgcttcaccacttcactggggcagcagccaggcagcactcaggtagccctttggaacgtgggccacaccctcaactgtgatcacccaggtcctggtgagacctgcctggcctttgccagagtggagggacactggctggaaatcctcaggcctgaagctgagtcctgcctcagaagcagccccaccagccagccagatgctggcagctgctctcccactggctgcccagacctgccctcctatgtaacgggatgttccctcttacctgttctcttcttcacctctcagcactggagcacttcctcagggaccaaggttgcattgccctgttctaacaccttggacttgtccttccagccactgtcacatttgtcattttactttggccagacaaatgttgcctccctgctaaaatataaactcctagagggtaggggcaaggcctgtcagcattgtgcctgataccgaggaggtattcaagtgtttgctggatgcataaacatggaacagaactagggccagccactcaaccagtcaggtggagcggggttggggagggtgggtccccaaatatttttatcactgtggtcattgtaacaaaaataataacagcttatttttgtacagttattaggatgtgcatattatcatacacatgtatctcacttaaggtcctcccaatcaggatcttagcgagctagctagtatcattatggtgattatttttccaaggaggaaactaagcaatatgctcacagcgaatactttgagtggcatctgaacccaagctgtgatgcacaggcccttgccaccagctaccctgcaggcaagctcaagagtggagcctgagataatgttataaggtgcatggacatgacactgatactaaatcgcataatgacaaggctgctgcctccttctgttccaatcccgactgccccaggacagcctccctttgatgaaagcatatttttaacacctccccaacacagaaagagaaggccagccaggaactccacagcccacagtcatatcttgttagaatgttaatgatggagttctgtgctttcattatatgtatttttatttttgtgagacaggttctcactctattgctcaggctggagcggcagtcactcatcttttgtgggcttaactgccatcatatgcctgactttagcgtctggcatgaattaatcccttattcatgctattgaggaaaaggcagatatgggcttagaattttcctattatgagcctcaccaggcatctcattccttctgggctgatttggtcctgatggccacagcagggagtggggacagctggtctagcagggtagctaagctacatatggagaagactggagaactagggcagaagaggaaaccaagggtaacctctctagaacacttgatatataaccagctctggtaacatatatgcagtacggccatattttaacctactttatgtgtttaatttccataaaaacaaccaccccagtggtgatgacaataaccaacactaacatgttttatcaattagaaagtattgttgttccaagtgaaagatagatggaaatgggcttagaacatagggattggggtgcccggatgcatgtctcgttcaggtgaggcgtgatgcagtgcctccgacgatgccactgcaggcctgatcccctccaggctctggtccgtcttccacggcttcgccttcaacccgaggctctccagtggggcagatggcatctctttcctggaagctccaaccaacgttgctgatgagtcactggctctgactgggtgacatgcacatgcctgtttaaacacctgtccagagggtgaggcatgctgttcggactttggagtcaaaaagacctgggttaaaatcgtgattcccaccattctccccaccccttgcctacctgcctggctctggcaagccacctccccttctgagtctcggtttctgcattcggaaagtggggataacggcagcactcacacagtggagctgtgaagatgaaacaagagaatgcggggagggcagcgagcacctctgtggagcatctaccacctgtcaggccccagcctaggtactgggaccacagcggtggacaaggagatggtgacctgcagcttctagcaatgtcgcaggggtgacagacactctccacatcagcccagaaacaggatcagagaaagtggtatcttcagaaatgctgaagtatgctctaaggagaagtcctgggtcttctccggagcatcagcaatgggtgactcaacctagcctgagaggtcagagttttccccaagaagctgtccttgacctgtaatctgaaaagagagttgatggtgcagcggagcatccctcatagggtcgccgtattgctcctcccagaacccaggaagtccattcctaccgtgtacttccacctgtgtggaacacttcccatgactgcgtgggttcgcctctttgagtctctgctcaaatttcctcttcactccagtcaaaatggtgccagtttcttcacgctacacatctttctctgcccttcccattactgtctctttcatcaagcccaatgtcatattagttaattctttgttttgtcttagttcttggaggcatctcatggaggcaccatcttgttcccaggggtaatcttagtacttagaaaaagtgtctgactcccagtaggtgcttaataagtagttgaatgaataaagggacaaacacagaacccttttacatgactttcatagtgatgtgagttgcgacatctcagtaactaagagtttaattctaaggttttttttttctttttttttttttttaaagccaaatgattcccatttcctccccaatccatcagcacgttccggcaggagattttgctctctcggagtcctacgtctctgagaaggtaccaggtcaaatcctgccccccctgcatttctgaatctgaattatgacttccgggcttgattgtgttactcttttgtttaactgtgtcctgctaaagtggtttgagctcattaaaaacacaattgtgaaatttctttcagaagaaaatgcgtctgtgccctagcttgagaagttctgtgaagtccattccttattttaggttttgaaagttccagaatccggcagccagcttagatttctgttcttccttcccccacccgcagtggcttctcctccgtcccattggtttttgctgccctctcaccgttcatttccttacttctctttcaagtttgaactgttcccaggtgtgagggaggaggaaaagtaggtgacatactaggaatgcagaaccttcaatatcttttttttctctagcgctggggacagaagtttaaatagtttcatgtaaggaaaaaaagctagctgtttttttttgtgggggggtggacccacaagcctcaacaacaatgaatcacctgcactctataaattcctctatttttaaccactgcttttgatgtttaagagtggcaacttaggtttggagcccaacttcatgttcagctcagccagcatctacaaatggatttctcaggaccacgacagcactttaggctgttgtaggacttcatttcctgcttgtggtagattgcaaatagccccaattcttcacacctctcttactacaccctttgccatggtgtgccctcctgagtcacaacagcttggccatgggacttggtttggccattgggatgttcatggagccaacagaggcttgcatggggcccgtgtgttaagctttcatctctggagccccttctcctgctatgagaaggacatacctggctggcctgctggaggaaaagagacttggggagtagaggtgagtaattctcattgtctcagtcaaggtcaacccggatcctccagcagctatccccagacaaacgactgagtccagcagggggtctaggcagtccacagagctgcctagccactggatgctttgctgaccatcattgcagtttgaggaacacttgtaatgcacattacgtggcaatggataactcatacaccatcctcaaaggacttccaatctggtgagaggcaaaagtttgcacataaccataattactaaaactactatcactgctgggtaacatttatccaatgcttatttattttgctccaggtcctatattcaatgcttcactgtcatttaatctgtgcgacaacgcttatcctcagttcacagatgaggaaattgagtctcaaagaggtgcagtgacttgcccaaggtcacacagctaggcaagggggatgtcagtattttgatccaggtctgtttgacttcaaagcccatgagtgaggccattatgctttcctgcaagtctaaatgtttgagcagctacaggaggatctcaacatattatttttttaaacaggcaaatcaggttgctagaaggggcagcatttgatctgggacttaaagtggctttggtcaggatttcatgcaatgaggtgagaatgaaggagtgcttatgtgaatatttttattctgcaaacagatcaaggtatttggcagctgctggaaagttttccacatccagtgattggctgcatttggtggacacagggactcatcactatatgaactttaaagggatacagcttgtgaaaaattcctctgataaaagtcaaggctacttcaaggtaattaaaacacacaggtgtgtttgtggcatgttgacttaacttattcaaaagcatctctcccatgtatctgctgagatgcttgaaattcccaactttggctgaggcattgaaggctccagttaaagtacacacatgttgtttgagataagttgagactgtgtgtgtgtgtgtgtgtgtgtgtgtgtgtgtgcgtgcatgcggtctgggtcagggctcctgggagggatgggaaaggtatgagttagaggcattgctgaaataaaacaaataccaaaatgcaagagattccaaaaacaaatcgacttcctttacctttttcccccaagggctgggtgctgttgagagatggaatctgtgcccttccatcaggaagtggtctgtctatgggtatgaggctccaggttagcattgcattggatggttgtataatgtgctgcttcggggtccaaatggccactctttctctcttccctgcatggtttctactcccaccagagatggttttgaacgagcacttatgtcttgcctgctagaactgtgaaatttcagactttctagaaaaaaactaagcatttatttcagtagctcttctcattccctgaccaatgaaccaacatagccattctgctgctggttctggagacaattaccatgagcagcatccatgttctttacagcctactccactctcacagtaagttgagacaaaacacatcgggatgcttttgactgcgagtggaagaaacctaacttgaactggtgtcagcaaagatggagatgtcttggctgatgtaggtgaaaggtccaaggagccatgttgggtccagggcttatgacttagccttgattccctacttctactttctactttctaccgattactctgtgttggcaccattcccggagagacttttcacctcatgatgacaagtactgctggcaccagcaagctttcatctgattttctcagcggctccccagaaaaacagaagagcctcttttcaaagtcccagaactgaatctcctgggtcctgagcagccaggcttggctcatgggcctatctctggacaaatcactatatttaaagttgtattaatttcttattgctgctgcaacaaatcatcatgaacttaatggtttaaaacaataccaattgattatcttatagttctggaggtcagcagtctaaaaataggttggaagggctatgtgccttctggaggctgaaggaaagaattcattcccttgccttttccattttctagacattgcctgtgttcctctgctcatagccttgtaccagcccaacttctgtttccattgtcacagcttctctgacgctgaccctccccctccctcttaaaagaacatttttaaaaattacattgcccaccgccccccacccccgataatccagggtcatctcccatctcaatgtctttaatcacacccttaaaatcccttttgccatgttagttgacatattcacaggttctgaggattaggacatggacatctttggggataccattattcttcctatctcaaagatgatgtatggtctgattagttaatccatagtcacaagcctggccctggagcgtcccctgaaaccacttggacagagaaggggaggggtggttccccaggggaagatgtggtccattaccagacctggagggatggggatgctggcagggcaacaacagcaaatgtccacagcagaaaacacaggaaaaaacttcaggactcttttgaacaagttttgttgcttttgggatcacccgatttctcttaggctttgaacacattttattgatagcactaaagttcagaatgcattgtgatcattttatttcacggagaatattatacacagtgtacctcatttgtaaagcaagggatttggagcctggcacttcctccagtgcatcttagaatgaaccacgtgccagtgagggaagacacagctaagagttggacaacatggaaaagcacttaattacttggtttttgagtaagtccagagttcctgctgctgtgggtgggtggggagaagaaattccagcatgatggaaaactacataatgtattatgttactctcccttaaatcccttaaattaaaggaaaaacaatcttcaaagaatcataaagcacataaagagacaacttgaggggatgcttatctgagataaattgcaacattcttaatggctgggttttgaatcaaaatgtaagtggtaaggactcaaagtatcagtcgcacatctgctgacttggaaaaagttgaggaaaaataaacacaatgaccaagccgtgcacttggccgagccccagcagtgtcctgatacatgacttctcctaggggcacattggatgctgaggcagtgaaggaggatcaaggaatattggcagacgtctgcggagaagaatgcctattcattcgtgtcctctgtagaggtcatcattcctttacatgaccttccatcagagattatggaatggaaactagacagatggagaggcagtgagttgtcaatgatacacagaagaaaatgggaaccattaaaaccttgggtatgagttccagaggcagcgctgcttaagcattatgaactctgtccctggaatcatgtggagtcaaatttgaatcctgatagactgccacttaatagatgcatggttgtaggctggttactttgaccttttcgagccttagttttttaatctgtgagatggggataatgttagcataaattttgttgagttgtcacaagggcaaaacaatgatggaaaccaccagcttgccattgagttacatgaattgtatatttcctttgcacatttcttagcctggaacccagaaggctttgtgatcttgccaagtctccaagccggctttacaatgaattacttcatattgtaattgaggttacctttacttgacttaagtgtattaatttagaaaggaattttatgtcaatcactaccatgcacagtaagcccgattccacagcctgacaaaggctccaagcctatggcctgctatccctttgtacaagcctatggcctgctacattccttttgtatccctttgttcaaaaatccctttgtacagctctctctctgttcgagagctgttaaagacacatcgagtcattgccctggccatcgtcagaagccagaagaacagtaggaaagggagctctttcgcttgagagctggtgttggcgagtgtcactgcaggctgctgcctcaaatcatggcgcccggcttgctttagggaccaaggacaatgctgcctcctctgatcatccagctgaacacactgtcttcttctcttagctctgtgcggcgttttatgttctcagcatcctggatccttggcgatctatttctgaacttccttacctcaactagagtagaagacccagagggcagggccagctccatcctggtatttggctagcacctcctggtgcctgagaggctcatccagggtttgttgatttttagtcccagtgaagacaagtggtggtcggcttcaagctactgaaggccatagacccagagagtggtctaagcagccatgatacctcctgtgtctgaacatggtacccggaaacctcctcctactccttttctccttttagctgattagtatattttctattcctccagccatcccccaatccaagaactttttattttgttgaagatggaaattttaattccaaagagatagtaattattatggtctgaatatttgtcctctccagatttatctgttgaaatcctatccatgaaggtgatgatgtcaggaggtggggcccttgaggggtgattaagtcatgagggttgcagccctcatgaatggggttggtgtccttagaaaagagacccccagagagctgccttgacccttccacaactgaggatgcagtgagaagtcaccatccatgatcagaaatcgagcccttattaaacaccgaatctaccagcaccttgatcttggttttccagaccccaaaaatgtgaaaaataaaactctgcggtttatcagccacccagcttatggcgttttgttatagtagccccaacaaacaaagataatactaaaatgatccaaattctagcccagcaggaacagaagatattgtgagtcttgggtttttcttattttcaaagcatcaagtgcaaaaacaaacaaataaacacttggattcaagggctaggcaggatgggatgggagtggggggatggagaacttcagcatcagcttcagtgctggaagcttgagtgctactctagttactgcagctctgtaccaatttacccagagtttagtgctgtaaaacaaccatttattatgctcatggattgtgtgggtgggaagttcggacagggtacagcgggacagctattcctcagttggaagtcttgagggctgggagctcaaatcatcggaaggcacattcactcaggtcagtggctgacactggtggtcggctgggaggcctcggtttctctccacgtaggtttctccaggtgatctctccaggtgggcttgttagggcttcctcctggtacagcagctgtgttcagaggacaggtgtcctgagctatcaagccagggggatgttgtagcactcttttggactgtcctcagaaactgctctggtcacttcagctgctttctagttttcagaagctggtcgttaaggctagtagagggcaggacccaattcaaccccattttttagagatgaggtctcgctatgttgcccaggctggtcttgaactcccaggctcaagcaatccatccaccttggcctctcaaagagctggaattacagatgtgaagcactgcccctcccccaaccccatctgttatgaaaggagggtcctttgaccacaagtgccctgagaagtcaggaggacttcccagtctcagacatttttatctgagctggagatggggacagcctcccacacacaggacttggaaggctatgaaggaagtagggggctctcttgggaggtcatttcccttggtagggacggttgtgtgaatgaacttggcctttagggagaggagcccgactctcacctgaagccacccaacctgtgcagatggctgaggaagccctggacaccacaggaccgctaacccaggatctttgttgactttgctcccaggccactgccccacacgcaggctctgaactcctgggagaggtagggagccagcccgaggcgtgagtcaagagtgtaaagtacaccgagttccttggcaagcaggctcttcaaggggaaggtgtcactcggggaacaatgagaaatgtgtctttccctcagcccctgatagaaaagataacaccccttgagcacagccttttctcatctgttcttgctcttggatggggggctgctactccggagcggcgaactggcgggcgggggtgcgcctgtgagtgtgagcgcgcgtgtgcgtgtgtgcgcgcgctctcgtggccttccggcagctggcagctgtcccggcccccaccccaccctaccccaccccacccagccgcgccacgccacgccgcccccgcccctcgctgtcctgggtgcgcctcgggccgctgcgctcctggccagctccccccagcgcctgggaggcgacccccagtgcgcccgggttcaaaggcccggcgaggcagttccagcccctctggggggcggggaggcgacgggggtggtgcagaagccagaaaagcccgagccacagccggccagctccgcgcagggatgggcagcgcgctctgaaagtttatgaccgccgcagccaactcctggccggagctggagacgcagcgagcgatcggccggcctcgaacccccacagctggagggcgaggccagctgtacccggccccagtgccctttcgcggccacaagcggccgtcctcctggtccggtgctccggcgcctgatctaggttcatggagccggggctgtggctccttttcgggctcacagtgacctccgccgcaggtaagcgcacggggcggcgcgcctctcctggcgcgagcgcacacaaaaggacccagggcgggggacccgaggcgcggagaagatgtgcgtcgcggggagcaaactcttgcctgggctctgcactcgtgaagacgcctgggggagggctggggagcagaagcggcgcgcaacgactacccgcacgggctccgggagttgcagcccgcgcactggctggagacctgctgcctgggccgacttggtcaatttttcatgaaactggggacttttcagaaagtttgcgaactattcagaggctgtgccaaaccctggcaaagtttgcagaaagtatgcaaaatgcatgcaagttttcaacgggtgcagatagcttgcaagcttttcacagagtgtgcagatagcttggaaacttttcagaaactgcgcagagctttggaaactttgcagacattttgcttgctccacccccctcctcaggtgtttgggggtggcgggtgttgaggggtctgcacactcagcttaggagcccctcaatctgccttctgcaggattcgtgccttgctcccagtctggggatgctggcaggcgcggcgtgtcccaggcccccactgcagccagatctgagggggactgtgaagagactgtggctggccctggcgaggagactgtggctggccctggcgaggggactgtggccccgacagcactgcagggtccaagccctggaagccctgggcaggagcaggcggccgagggggcccctgagcaccaccgatccaggcgctgcacgtgcttcacctacaaggacaaggagtgtgtctactattgccacctggacatcatttggatcaacactcccgagtaagtcagccttttgtggtgaggaacgtggctcccggaccaggcccacatctgctcattcccaggaggacctcactccaccccagccccgctcagttagcccagagcctgccctggcacagcctttagctcttgctggggcctcttgccagcccaggtctcttctgcaggtcaggggtgtgacccacatcccccctgagggcctggcccaagagaaactcaatcctgagtttgatcctgtggaaggaggagccctccctctgaatgaagtgaactgaccagggggattagatacctgagatgtctctctgagcctcttttctgagatagagaaagccccgaaagtttatctcattccccaggggccaagggggctcatactcactgttgaccccaccaggatccaaggggtttaaaattccttgaaagcatcctggtctccagggagtctaagggtgggtttagctgagcctgacagaacctgcacagtccactcggggtagaattcccctgggatgggctcccttccttcctgtgggcccccctggatgccaaggcagggtgaattcacatcagctcgtccttgggccttccacaggctggctccagtcacccactgccatggtcacagagggccttcccttctctcctgcagtccttagaaactctcttaccctagggcctagacagcaccatcctgaatttgtcttggggttcgtccagtggggaagtcagccttctcctggggccatgtggagagagtgtggctctgacagggggaggctttgatgactcccagtgttcagggaacccctcctgcaggcacatcatcttgcaggccatacagagggcttgaccttgcctgggtcaccaactctctggcattggcttccccatctctaagatctgggacttggatcagacacctctaagttctgttccctgggtgttcatgggatctcttgggactcttgcttgtaccctattagggattcttagctgagaactcagagatggttgtgaatgcaagcccctggaagcctggaaaggcacctttgccaccgtgtcccggagccgtcttgattcaggttcctcacggtcacctttatccccaagccccataacctctgagcccttggtagcagctttcatggggctcacttacctaccttgtgtcatcggcacctcaaaaatgaagtgcagacgagggtagtaaacctgaggggtggaatgtctttcagaccaggggacaagacctctaatcacatccatgatagatctggaacatcaccccaccatgcttgaagggcaggcaggggcttcacattgagccagcaggacacgtgcacaaagtcctgcactcagaaagactctggctcggcttaaagtcctgctgtcactgtcttgaaatccttaatactttctgaacaaagagctgcacatttgcattttctcctgggtcccataaattctgtagctggtcgtgataccctgatttgctggctgggctgtgtccacctagaggatgggaggtgcctccctgtttctttccctttgtggggaagatagaagctgtgagtgttgggccatcatcaattgcctcttatcctcagatagcgaggggagtcacctttccttgtagcccctgcaccttggcactgccctttctgattcttatcctgcatcattgtgctctgatcaaattcacttcatagaatggagggcactgggcagtcaccaggaaccgagttcttgtcttggccagaatccccagctgtgaatctagaaggagaaagaagaaagctaatggaattacagacaggaacctggggtggtgggcaggtgggagaggatttggaaaccatctctttcattcgttgcctgtttaccaaaccccggagcactggctggggaggaagtgatgacttgagacatgtctgagagtctcaaccaacaccctgtgatctgtttaaaattctgtctcatgcatcctgcgatctgtttgaagtcctgtctcatgatttcgagtttgtcctgaaatgaagctgtggctctctgactttttccaggacagccaacttgataactttccccctgaagtgtgatttacctcttcccttccttcccgacactggttcaatttaaacatgatgaaagaaggattaaatctggtgtttgggcatcccctgagctacttgggaaacaaaaacgacaatagccagacttgagcattttgaaattagacaggtaaaataatttttatgaggcagaacttcccaaatggcctccttccctcccttcctgcctccctcctttctttcttaccctccaaacttcctcctgccctccctccctctccccctcccttctttccctctttcctttcccttcttttccctccctccttcccttccttcctgaaactctgtagatgtgtagataggtctgttgtcatctttaaaatatctcaggcaagactgcaatttgagaaaatgggctgtggtgacagggaacaggagtgatggggaggaatctaaaaaatcactgaattgagcaaaagaggcactggaagtgagggacacagtcttttctagtggttctgtctccccattagatcacaaccccacctgtcacatgttcccctctcctgctgtcacgccctcttcattcatggactggtctccctctccaaacttctccaccaggtgtgatttctccctgtcccagcggcagctgttctgggcacgagaaggagccttgattcttgtgcctcagtcaggggtcttgaactttgggtgcttttcacctttcagagcctttcctcccatggcgcatccagctgcgtgaagacagaatcaacactcctagttgatctttgatggaaattgctctgagtacggtcatttttgctcccttcgaggatctgagatgctgcaggagtcatattgggagttactaccgagacccgctttgcatctcctcaagggaagttaactgtctagttcaggctcaagagactagttggtctcttaagtctcttttggaaagaaggtctgagattcctcggctgtccctttagccctcctgcttttttcccctccttagtccttccagacccgagcttggtcggccctttctgttagcacccagcatggcatggatgctcaggaaatgctggttgacttttggctaagtcctgccacctgggtactctggctcatctttgctgttgctgagcccctaaatctccagtgccttctcccacacaggaggcctctttctccaggtgcctggctgctcttcaggggcctgcacatccctgtagacaggggtgggcaagagagtttttcttggggatgttgcccataacttctgtgatatcttcccaaaagtccatcgccccaaagaggaaccaaatttatacttaccctgtcaaggctgctgggatcacagttcatcaatgggatagcatgatttccattagcctttccttggctgtcccccacagtccccaagccatcccaccactgccaacaaaatcaaagtcccaaatcagagaaaaacatatcccatcctattgtcatggataagttgccaagaataagatagtaaggggacaggtggtgaacaaggggtccgtgtgctgatgtccttgtacactgcggctgtcctctatgagcagactgaagaaacagataccaggtagctggggcctgtaggagtcagggttctctagagagacagaaccaacagggtgtgtgcatgtctgcagattatgcatatatcagaagtgcggttgccaaaggaaatatttggttgctcttgggggccatggacttttatggaggataaacagaagttatgggcaatgtccctccagagatatatatatggagagagacaaagagcaattttcagaatttggcttacatgattgtgggggctggcaggccagaaatctgcatgccaccaggctgaaaattcccgagggagttgatgtcaaggaggtctggaagcagaattcttttctgttcgggaacctgtcttttctgtgaaggccctcaacagattggatgaggcccactacattttggagggtcagctgctttgctcaaagtctactgatttaaatgttaatcacatatcaaaaataccttcagggcaacatctaggctgctgtttgactaaacaactgggcacagtatcctagccaagttgacacctaaagtgacccataacggggatgtcagctcgaaccacatttcatggcggaccagcccctcagagcctggctgaagactgaaaacctgtttatccaatggctgactgagctgtgaagcacccagcaaagagccccactgtgctcctccccgccccatgagctgagggatcctgccatctgttcatccctctaaggacatctgagggaggcattgtgatgctggatggtgactgtgttttccaaaccaaaatctgacacacatgggctggcagataggaatgtagttatgaaaagaacagggcaggatgttgggaatcatgatcatggtggaaaatttgggatttgcagtcccgacttgtggagaagactccagaacccagaagtgctgcccttgagtcctggccatgactatctgtgtggccttgagccaggaggtgctgttgcctctctgtgaccctctggaaggtgcagacatcagccgctccaggacagtgagctgccaagtctctcctaatcccaacagtctgatcagctcctatcaagatgcccaggccggcttcccaggctgccctggatcaagccacactaaacttaatccagcaggaatgccatttcttttgagtttttttctcccctaaatgcataaagagtaaaaaaaaaaaaaaaaaaaaaaaagcattaacaaaacatttaaacttgtattttaatgtattctaccacaaaagggcagcatcacagattctggctttgccttctgtgttcttcaagaaaggcatcttggcatggtctcaagaagagatattccaaattttagaacatcccaatagaacggttggatctggaaccccaacttcctgcacatgaggagccagctgagcaccagaatgtgattttgggatcccgataaaagtcaccctgggccaggcgcggtggctcacacctataaacccaacactttgggaggctgaggtgggcagatcacttgaagtcaggagtttgagatgagcctggccaacatggtgaaaccccgtctgtactaaaaatacaaaaaatagccaggcatggtggcatgtgcctgtagtcccagctactggagaggctgaagcaggagaatcacttgaacccaggaggtggaggttgcagtgagcagagatcacgccactgcactccagcctgggtgacagaccaagattccatctcaaaaaaacaaaagtcaccctgacctgtgagccacacctggcagtatcattgttggacatgtggccatatgaggcagagggccagtctttctgccatcatggttttggaaaggggtcatgaatagtctgctactaatcatggatggtgaggatggctgaccatgactgtgacctcatgtcatctcatgggatcagcttgacagccccattagttggatgctattgtccctgtagtttacaggaagaagctgagcccaggaggcggagtcagttggccaaggttgcagagcttgtgagtagggactgggctgccagcccagaagtttggccctgaagcctgccctgtaagcctcctcctgtgtgcatgttcccaacatgggcttcttaggtgactaatatgccatcttagatgactcctgctttcgttcatttaatatgttttcccagagtgcctcacctgggtcagtattgaatggggctctgggacccaagaatgaataaaagacatggttccccatccgtgactgattaagggtggttttgttctttttgagacagtgtctcattctgtcgcccaggctgaagtgcagtgatgcaatcataggtcactgcaactttgaactcctgggctcaatcgaatctcccacctcagcctcccgagtagctggaaccacaggtgcgtgtcaccatgcctagctaatttagtaatttttttttttttttgtagagatcgggtcttgttacattgttagggctggggttttgttctttttgatagtgatgattcatatatataattctatgtaatcatatatttacccttttgcaagattatttttattaacatatgttaacacatgggcaaaacccaaatccttggtccatcacaagtcctaaattttattctggaaatgtagccttggcttgcatagaagcatgtgattttcctttagcctaccagagcccttggtggtttctctgtgggtaagaggggctggttgagtgtgcactccaagcaaaccagaaggtttgtcctgatgtcagagatgctgggacagagggggctgagtctaggcgagagggcgagggacccccaggccatgagtctcattcctggtgcaggatttttcttttcttggctgctgctctgtgccttgttctgtcttcttgcttcttggtgtggttacgggagcagggcagacataggaggtgggactgctcaaatccatctcttcttgcagatccagcttcacactttggtttagagactcctggggtttagagaggaatggggcctggggcccactcatccaaattgtcacgtggaggaggaacagatccctttgtaggggttaagagctcaaactgtgggctcgaatgcctgggctgaaatctggatctgccacttaggagatgtcacctctgagaccttcagtgtccccatctagagagtgggggaatagatagcactctatgaggaaagatgttttcaggatgacacaagaaagtacacagggcgtggttagcacagcgcctacaatctagtaaacactcaacgtcttgaagatggtggccacaatgataacaacacaacctccagccctgcagaagcccttcctgggccaaaaccagtcctcctgccatatccaatcctgtgattggaggatgctggctggtgagtagaaagtccttgctcaagttctgctggggtccacctctttggaccttctgactctgatcttagctcctggagtgccccggagcaaacctgtccaccctgtcccctgcaggacggtctgttagcctcaattagcagaaagcttacagactctgggaaaaggtgtgcctggctgtctgctgttgctgataagcagcctgataaagactctgtggtcaaaggttgctgggctgggctgagattcagtcccgcccttccagcccctcctttctgctttctattgcttccctctccccttggtaaatcactgaaagttttcagtaatggggcatggcgctctttgcgggcacccgtctggggctgtgtctgtgaaataggaggtaggggtggtgattggggtgattagggtctcagttcaggagaacaggaatgatctgtttacctctttgttaaacacctatgctgagagctctgtgaggcatctgtggctctcatgtccttggtacgtccagcagagtagatataatgccttgtaatttgcagctgaggaccccatggggcaccagtagcctcacttctgacttcacccagcattgcccaggacctgaagtgggtgtcaccaactgggagtcaccaggaagcaatcgaggaaatcccacagacatctatttagaaaacatcatttcatgatgtgcttttgagacgggcatgtgaaagaagagggtgttggccagattaaaagggaccctgagcttgaggttctgactgatcatggtttcaggaggtttttcccctcacataaccatttctatctcttccttagaaattagcacacttttgggtaccagttttgagttggagtggcatatttcttagaacactggacggcaagatacttctttaaaattggggagacttagggctaagtttcgcagtttgttggaaaggtcagtcctacgaggacttttctgttggggatgcacaggtagaaagcccgttttctgccccagagtcagcaggaagtgtgagtggtccaggaacaaaaacagacttggtggaatgcaactaatctccacttgggagacagagggacttgaggctggaaggcagtttgatttgtagcaagaaaacttggtacaaagaggttgtgaccctgtgtgaccccgagggagaatttggatttgtgctagatgaaagggccattacagtgaggaacttggccttcaatctgaaggcacatgaaaggctctgatgtgtctggtcatgtttgttcctgcaagaatttaaaacaaaggaagctgggaggcaaacaatgcttctgctttataattccagttccaaacctcagagggggagctgtaaagggtgaccctgtctacggcaccaccccgcgttccagtgtattggaagtggatggtctctgttttgcatgagaaagtgacctggtctccttccttgtcatgtttcagttgaaacagagttcctcaaaattggaaatgcacacacacatacacacagacttttgcccactttggaatagaaattaattgcactcggaaaataaattgcagagcatggctgagtacagacagccacatgtgaatgaattgtttgtccgcatagttttgggggcttcggaatcctggctcacccaccaaacctcccaagaatagacagacaggatgaggcatcagctctctttctcatctgccccacctcagagtcttaggagggccaagagctttgggagaccttggggacattcacaggcttggaagcactggcctcttcttcttttgtggcctcctcagggcagacttggtgggagctcttaataaacagtaactcaggaacagaacagtcagggaggcctggtccctggcccagtaattgaaaaaccagaaacagcttcatttcatatgcattgatgacaaaagtaccgacagacgcaaccaaaaacatgactggcccgctggtggacagtttcgccccacaacttggggagcgcaaattgctttgccgagagtcagaagcaactacatgagacagcagaggtccatgtaacttttctggatttttaggaatctgatttccatgggtctcttgcagggctgagaatagactggggtgagtgaggcactccctcatgtacaaactttcaggaggcaccagaaagtaggaaaaaacaagtaaaatgtaatgcactattttcagaaagccaaaatgagtgcaaaaaaaaattcataatcgaccaaatattgtttttagtaaaggcaggatccagccctgagcttgctccacttacctcacctgcctcaccctaatcccagccctggcatcttgcttgaggataaagcctgtgtctctaatagagactcagtagtttgaggtaagtgataaatctattggagctattactggaaaggggtcccgatccagaccccaagagagggttcttgcacctcgagcaagaaagaattcaaggcaagtccatagagtaaagcgaaagcaaatgtattagagaagtaaagaaacaaaagaatggctgctccatagagcagtggtatgggctgcttgattgagtatacttacagttatttttcgatcctatgctaaacaaggggtgggttattcatgaattcctggaactgaggttcccccttcctagaccatatagggtgacttcctgatgttgccatggcatttgtaaactgtcatggcgctggtgggagtgtcttttagtggctaatgcattataattagcatataatgagcagtgaggacaacagaaggtcacttgggttgccatcttggttttggtggattttggccatgttttttttttttttccacgtcctgttttattagtgggagtctttgtgagcaatgtcttgtgtggacctcccgtctcatccaatgagtaagaatgcctcaccttctggcaatgcagcctcattctacccagcccctattcaagatagagttgctctggttcgaacacctctgacagagctaccaaaagggcattacacaaggacacagacaattaggttaggtggaagatgagcgtatctttacggtcattgtgatggtaagcataagtcttgctcatgaagatcttttccatccttaacctggtatctcctgaaaattagcaagagtgtcttctcttgctttctttaaattattcaaagcatgtatcatggtgtcggcattttttttaatccctttgcacataaccccatccttatgaaaatacttgctccctgttttccctcttctctttccactgctgggaactattttgagccctgtctgtctgcagctttgcataaagttataatgaggctgggccaggcagccatggatttctcatgcctacattcggcctggaattcagaagggtcactgggggctggggagagaaactctagcctaactcgtttgatgcattttggttgtaccagatggagggaaactgctaatctgtaggattccatagacggcttaattccccaagttttggaggagtttgtttctctaattttttttttagccataagtcttgaaaatcctgcaccacataacaaaaaccagaggtatttttctgttgttctcctttcctttgaccccctggtgcttcctccaagtatccttaagtgtgcaggtgcctgtgttaggggaggaataggtctatggtccaatgagctgatgagatgataaatgctgcgactttgagattctttttaatctcagccttatggtaataggccatggaagagtgtaaacagtttgggctaaggctttctaaatacagttgatgagatcctgggaaccacttatcttgggtggagtggagcacctcactttgagtttggtgttagcgctggggcaaaggtctaaggccttctccagtgattgtgctatttaaggatgttcaagggatggtgagggcctttggaaacatctgagtggagtttggagccagagggaccctggagagacccagccagcccttttgtttctcagggccagaaggaaggtgcccacctttcctgtgaatgagtcatccttgggactagaagcctgggtcttccagcttagtaaagcctctgttttgctctggtaccttacccatctacgcagcctagtttgtccaccaaggtgctgatgtggcctgcaggagttattgccaagacataattcttccacttcaagtaatctagaggccacaagtaatctagaaggttttctaggaaaacccctcaaagaccagctgatgaaggacaaaataagtagagatccattgagtcagccaagaatgtcatatgtttgggacactgggtagggctgtgcagtgatggctcatttggaccctattcattcattcgtttaacaggtatttattattgagatattgggacttgattttgagccagacatggtgtcagctgccctggatggagaggtgaatggggcagacacaaccagtggctccggctggacaaggtcctgctgttgctgagccagggggttgtgcctgggccagacaccatctcttaaatgaaacgaaggaactggccctcattcttagatctgattggtaggggataatgctcagtattctttttgaaaatgtatgtgatactgttaaaattctcaaacagccaagtcctgggtaaatccaaaggttttttgagggggaaaggagggggatagagtaattttttaaaaaggcaacaattaacccacagcacattgctcactgcttttggtatttccaaatattctagaatcatgggctctttctgagggctgcgggagatggacttcccaccttgtggggtggtgggatgaacggtctgccttgggtcctcccaactttaagccgtgagaattttctgcagcagaaggaaagctatgaattgccggttcactgttctgatgtttaggaagcataagctttgtataatattctttagaaccagaaagcgcctgtgtgtgttctctgcttatataatgaggtcactgaggagctatgtttcctggcctattttctttcctggaagttggaagggcaccccatgggctgtctggcataaggcctggcccacagcagactttcataagcatttgatgagcgggcaaggaataagttcagtagaggacgaaacttctgaggtggtcaaatgagcgtccgggggtgggctctgagcctcctgggaaggaagggatggcatgcctgcctccacctgctgaaggacagacagtgggcagcgggcacacctgggggaaaggaggggcatagcctgcttccacctgtggaggacagacatttcacagtgcacacacttgggggaaaggactccagccagcttactgtgctgggtttgtcctgattctgaacatgcttttctgtgtgttgtcgcagtgaagaaaatttttccttgtcctcaacagctggggagactacaagccttcctcttatacccaagagtctgtggttgccatctcatgaaagtgaggtccaggatcagccagagttcactggtcacaagcaacagaaacctagtctagctggcaaagcacaggaggagtttattggaaggacacgggaaagctcacagactggaggcaagaagaagccctaggctctgaaaggagaggtgttaggacaggattgggggtctaggggtgcaccaaatggacaaggaggggcggggctgcttggcaaattgtagctccagagtgttttctgatctcgagttgcccctcttaggagtcttgggagagagtgggtcctattggcccagtttaggtctcctgaccagtcctcaggcagtggtaggtgaggcccatcaattgactgccccccagagacctcacacaatggaaggcggataattctccaaagagaaggtggcagactggatcctaggagacaaaaataaccaatgctggcctcgggctccagagaattccctgcttctcagtccttggagtgcaggtgctcctgttcctggtcctatccctcccctttgtctccatgtgttgtgcgtagcagtgtctgctggatgtttgctgaagcaaagggtcactttcatgggcctttgaatagtcagccacttccacaccagagattgcatatgtaggtgtgctggagggcattttgttttttctaagggtatttggattaatctttctatttcaccctgtcttagtcattagagccacgttctgactggttcagattacagatggtaaataaaggtgattgacattttcctccctgcccaggcagacatttctaagcttgggagagttgatgagtggtgccttctagggaatgtaataaagtctgaaattgagctgtagttagaaagcatgcgagggtctagaagttgtttctccagggaatggcaggaggtagtatccaatgactgctggtgcctggcagctgggggctgcctcctgactgtctgccagtgggaaacagttgtttctcctcctcttggccacaggacaagtcacagagccatgctttctgtacaatatgtcccctgggccaaaaggcaatattgcctctgctttcccagttcagaaggaaaaatgtgaaccgaggaagcagatcatcaacttgacatgtatcctaagtgtgacatgaacatgttctatttgttggggagacactcaagtcaccagctgggctttttaaatgaaaacaacacctctatttaaatgaaacaacgcctctatctgtaaagaggaaaatagtatcaggtactcattttgttcatgtgtcatctgacctatctgccttcgctttatggaataaaccactagactaggagttgtaaactcagatgctcctgagggccagacacataaaaaagatgagcgaagggggccaggtataaaactactgaaaatggtggggactggggcagaatggagggtttacgcccagtctctgagatcattacccggctgccatgctggaatatgaggttggtattagcacaacttccaattcttcaagaaaagctggaaatcgggatgtttatgtgaaatttccggatttaacaaaaaacactatggttcacgcctgtaatcccagcactttgggagggtgagggggtggatcacgaggtcaaacgactgagaccattctggccaacatggtgaaaccctgtctctactaaaaatacaaaaaaattagctgggtgtggtggtgtgtgcctgtagtcccagctgcttgggagggtgaggcacgagaatcgctcaaacccaggaggcggaggttgcagtgagccaagattgcgccactgcactccagcctggcgacagagtgagactctgtctcaaaacgaaaacaaaaacaaaacactgttgactgaaaaaagctgacaaaaatgccaatttgctgacctcagtactggattaaaagtgtatgtgtgcagggcagggccccgccccttgtctgtctttacataagttttacccggagtctagtccagcgcctgcatgttgaaaagcagttggcaaatatttgttgaatgctattcagttgtggggggtggaataaaaactgggttttcaatagggaatgacagtttgataagctttcctaagaatttagaatctggtcagtgggaatatctgtgtctcttctttaaacttcagatatacaggccagtctcctgatcagaaagatggagagtgttaattcattcatgaaaaggcaacacggaacttaaaaacagaatctttaaaacaaaagtcagctttccttatttaaaaacttcttgtagagagaaataaagcgttttcagtgtggtgttgcagatgaagaatgaatatgagagattggggaatttaatatttaataacacttatacatgatgtttgggaaaacgtgacaaataagaaacatttgataaaaaagactctgttgtcaccacaccaatcaaataatgaatgttctgaatacataagttgagtgataatttattggatgaacacacacaacaccagagattgcgtatgtaagtgtgctggagggcattttgttttttctaaggatatttggattaatcttctcacctgcttttcttttgcatggagctttgttttataactgagacatgaacagatggaagagctgcctacttgtataaaggattgtattctgaaaaccccgttgtattatagagcggtaggccccagccactgggcagggcatgctggtcaaaggttctccgccaatttcacttcacgttcatggtccaccgttaggtctttcctgttcactactcagtaaacagccagcgatgaagcaggccacaaatgaaatatgaatgctcatgagatatgagtacgttatcactactgaaatagaagtgctcatgagctggtaatctggcgtcagagctcggtgagaaggtggtgtcgaatgaggtgacctgtggccttgggctccttattacccttctttattgctaagtcaaacatctcaaatgccaagcttagtaggtgggacttttctgatacaactcacttgacctcccagaccagataaataacaatagtagctactgtttgcttatggcactttgctaagtattttccatgcagtatctcctttgctttgtccagccacacttttgtcgaccaggaagttgttgagagggtgaagtgatcatcatgtaacataagagcagtattaccaggtcatgtgtctctgtgtgtaccttgcacatacctgtacctactggccttttttcctttacctgttttcgtagtccaacagcatataactcctgaaggcatggacacatagggatgtgcctttctgtgtccctgtgacacttacattgataccacgtatatagtggatgctgaagaatgttggagattctttcagtgatttttgtggttattgaactctttagggtgaaaagaatcctgtctcgccagactagaatgatctcaccatgaattaccagttgctcaatcaataatctgttcgcctggccttgtgtgaggcccatggtgggtaaaaaagaagtaaaagacctgccctctcttttgaggatccagtaatctgcctttagacttgggtaagaaacactgcaactctgggccctgtgggttagaggactgcctctgacgccactctggccatgcctcccaccccactgtaagagtctgggactcaaagccatatgctccctcttcaagaccatgttccaggtattcaggggctggaattccctactcacgcatccccaagaccacttccagggcctgacacttggggatgagcagggctccaggtacatatctccaggcctgcagggtgacagctgcttacaggatgtagggtggaaggagcttggaggaagcagcctggggcatgcacggggagtgcttgaagccagcgctggtgtgggatggcgcaggatagcagagaaggtactgggcctccaccacatgtcgatacggagtggccaggagcccaggattctaaattaaaagctggacctgcaaggcagcatttggaagccacatttgtccagatacaggagataacactttttcgtttcagggcttatcagatcgattgaaacctttaaatgattagccctgtgggaggtgggcctccatcgcgaactctcattccagactctacaatgtcagcggcaggctctgctgggccgtcagcttccctcacctccgcacgggtcggtcagcagactgcacacccggaaggcccaggccttggtggaggggtttctgtgcctcaaggctgtagggcaggggagggggccgtgcctctctaaactgccagagcctgtttgcacaccagcactttaccgcgcttggcggccggggaagtgctaagcctgtcttcattaacaaataccatgttgccttgtttccttacttaaaacactttggagtgttttggctcaagttgaggggctctacatgtgcaaatgcataatcagctgacagcagtttcaaaattgcaggtctcactattgatggagaaatgggagcgttgttattccttgtgtgtaattttctccaagaaatggggggattgatttaatgtcaacactcagagatttaatgtggccctgttactggaaaaatacacctttgccaaactctgcctcaaaacaatgtctacattgtcttgctgcactccctacccccatttcccattcctgagaaaaaacgggcttgaaggagggttcagctcaatacagggctggatcctgccctctgtctccgtttcctgagcacagatggctcatcagcggggcctgtctctgcctggagggatcccaccacctctgtttctgaggaacttgggtgggagggagttagtggggagaacaagagtcaacgaacagggtggggtcagttttaggctcttgtgttcaacccagcagggaggcgggggcgggggactccctccaagccttaggtcactatggggcttcctggcccaatttgccctcactgtcgcaaaaaggctttatggtgtgtgtttcaaatgaaaagaaattcaatttgattttattttgaaaatgcagcgaggggctgggcatggtggctcacacctgtaatccagcactttgggaggccgaggcaggcggatcacaaggtcaagagatggagaccatcctggctaacacagtgaaaccctgtctctactaaaaatacaaataataacaataataataattagccgggcgtggtggcacatgcctgtagtcccagctacttgggaggctaaggcaggagaattgcttgaatcggggaggcagaggttgcagtgagccgagatcgtgccattgcactccagcctgggcgacaagagcgagactctgtctcaaaaaaaaaaaaaaaagaaaaaaaagaaaaaaagaaaagaaaagaaaaaagaaaatgcagaggggatgtcaggactccctttgaagtggataattggtactactcagtggggttcatggaaaccaaggtggttcatctctggggactagcaagaaaaccaatgtttattggaaaagtggctttggccacatgtttcttctagctattagtaatttgttcctcaaatcaagctagtaagttaaggatctgctttcaacttcttcccgctgaactgcctggcaggcaccccctttttctctggcaagtgatgatttggatgtgcacactcactagaaccagcttccacgggttttgctctgaaccacaccatcacactcctcctgccaacgccaaccataaacgaaattggtcaatggtttcaagccttcttcatcacgcggctcttctgaggctggttccactttcagctgcatggccaggccctcacccgcctctcagaggtcacggagtgttccttctgatgtttgtctctttgaggaagcaactttcaaaggccgggatgcatctctaatgactgtaattgcatttcccatcttctcattagcacaaactgctgtgcacatggaagaaattcagtcagaaacctcaggtctggcctcaggctgcggggtaggcaggtgatctgatcagggcgaagacccagaccagcacgtaggttgccccacatgcccttggcacaggaagaaaagcctctggaacaggtgctatggttgtctttaattctttctcggctttccatggaatgaggaggaggcccagatggtacttccagagccgaggagcagaacccggcccggaggagctaggccggccgtggtttggtcttgaagagaatgaaagcccacccatgttcacagatcgcagagccccagggcgttcaggccacacctgcagctggtgccttgggtgaggctaaggggctcacaagtgcaggcacacatgcccagacgcctgctgggctccaagagtgctggctgctgcccagctacccagaccctccatgtccttccatgccctcagccccaactctcttcctgggggttgtggagggcagggggtgcacagttcactccagaaccttcctaagacccagagctgtagtggggagggttgtgaacaccagtttctgagaccttttcagccaggcggtggttctcgctccacacccttgggggcccctgagcagggaggcctgggtgtgctcacctaacattaccctgtgctttgcagacagacggtgccctatggactgtccaactacagaggaagcttccggggcaagaggtctgcggggccacttccagggaatctgcagctctcacatcggccacacttgcgctgcgcttgtgtggggagatatgacaaggcctgcctgcacttttgcacccaaactctggacgtcagcaggtatgacacctcctccagtttcactcatttgcagatatgcatcaaccctcggcaaggccaggccaggggcttctcaaaggagggtgtaggatagttcagtcacatcctgacctactgtcgtcctgtgggccagagaaaggaggtgctgagcccagaaaagacccaggtcctcagcatcaggagggcaggagatgcagcgtccccacccccttgctgccttttggaacagaagcttcacagtggccgtggctacatctggtttccagacatatgtttttctggcctgcacagcactttgtgaaaatctgaataagttgccaacacttaaaagattgaagaattaacccctgccaaatgcgtatttttagccttctcgaaaatagcccatgataagagtgcaaaaggcttattgggaggggggggaacccagcacgtaggaccatctggtctcagagccccccttctctttggccaccctcagctggaactgagtgggggcatctcacgtttgagtaggatgtgcaatatccatttacctgttaccaatttatcttactttgtagcccctggaggcccccaagtttgagaccctgtggtctgtcctggctgccttagggaagcttgcaaatcacgttgaatggaaccaacaggcagactccatgtttgacccaggggctttgagctggtattcacataacaggtattcctgttaatgctccttactccatctttttcttaacttcgggccaagattcatgaacccagtgaggcagattggccctttcaaaacccttcctggagcaggcgtaggtgagctgccctgatgcacacaaaagacacataggcaggggtgagctcccaacaccccaacaaggcagacggtagcgctcaggaccccaggatctgccgtctgtgaaacccagtgtgaactgcatggtttttccccccttctgggcttttaaacatccgatgaataagtgagtggtgagtatattctgtactttggtagaaatccacccaccgagtgctcagccttcagaaactgtgcctgagacgcagtccttggggaacgcactaatgtgctcattggtggggaagaggaagtcataatttgacaccgaaaaaccagccacagggaaaggcaggttgattgattaaaaccagctctctccccacagtaattcaaggacggcagaaaaaacagacaaagaagaggaagggaaggtgagaggtgccaacagaggcctgtgtcaaaggaggtgaagatgtgacgtgtcattccttcgggggtgggtggagggtgttttgaggggatggcatctggtctggtccagtgggaaccccagatctcatgggatgctgcacccacaagcaatggtgcctttggtggaccgtttctgggggcagagcgggctgaagctgtggacagctgctgtcacttgtcggtccctggccaccctgctctgtgtcctgggagccagcccttgcatcccttgtagctctgggcagtgatgtcctgcctggatttcacctggcctggacaaagctagtcaaccaccgctctcagaggccctgtaggctgctctgcccagacccacacttcgcctctgcttccttagcaacatgtggtctttctcgtcaaaaaaatcatttattcttttcagcagctgattctgggcagaggtgaattacagcagcttgacagcagggtcccttggttctccagttcattgtattattttttttaacccacttgtcttttttgtatgagagatcctgagggtttcctgcagtcaaactgggtttatttgtcattctatcaatcagaagtcattattaatgactccgcagctcatctgcaatgggatggtaatttatgttcataataatagcctggaggtggcttgggtttctacagagactgatcgagggaagatgaaaccatgctcagtatacaggagctttccaaattggtggcagatcgcttctagtctagtccagagagggatctgtcagcaaccataataaaaatggagcgggaggaggagggccgaggcggaagagacagagcccgggagagcatgagtcagacccagatggtcccactttgcctcttcattctttttcctctttttctcttcctcaccccaaaccaaagctcctctcagcgagggcgggatgtaattaaacccatccatccattgcatcatttattcattcgcttatgcattcgttcagcaaagacttgttgggcacctgctacgggctgggcaccattctcgatgctggggacatagcaggaacaaggcataggatctcttttatagagcttaactagtggggatgcagacagcaaacatgtacaatttaaagtgagattgcaaagaataacagaaagacacggcaagggtaggaagcgtggggtggttgcagtttgagatggggttgacgtggcctcatctttctcaccaggtgacctgaaggaaggctgggaggagccatagggatgagtgagggaaagggatttcaggtaggggaaccggtgagtgcaaacgccctagagtgtgctcagggaacggccagaagggagccctatataggagaagcacaccggtccttttgctgttgtggtgattattactgttctatgtcacatgttcaaaagatgcaattggtggtgcagatgtcccagcagggcctggaaaagtggttcttccaggtctctatgagtcatgtaaagctctagtaagaagctttacttgggaagaaaaagtctcttattaagccaatgttcttgctttcttgcaagattcaagttagtaattcccagattcacattctcagagtggaagctgtcaccatccttagcttgtggtaatcaaagatggggccaggctgcgggagggcccctagcagccttgtctgctggtgttattcttttcacacttttccagtctggtggtaggctcggaaattgctgagaagcactgggaagagggtacatacagttccaatcagggaacaggctggagaggcagtgggaagacgttccctttttcagcttcacagaactacagagctacactttcataacatacctttctttttttttcttttgccccctttccccaagacaggttgaagtcaaggaccaacaaagcaagcaggctttagacctccaccatccaaagctcatgcccggcagtggactcgccctcgctccatctacctgcccccgctgcctctttcaggaaggagccccttaggaggacaggcctgcagcatcctggtctcgggaggcttctgtcattgctcacacacagttcagatttccacctctttatagacaagaagtgaatttgcctggggcagaacacccacccaaagagtccccacttaacaataccccccccccacggcaagaatgcccaaatccgaatgaccccagttttcctaatgagtaaaatgatcccagatgtgccccagagcatgacgcctgcagctccggtttcatgcaggaaattggttttggagagttttggcaagttggaaagccacttactggcttttgacatgacttctcttggagaataagtggactccaagctaactctttgcaaatgtaaacacatgtccatcttgtaataaatgcaaaatgcccgtgcagcagaagcatgcgactttcatatccttgcctagaataggctgcatggtgtatgtcagtgagggccacgaggcgtcggctttagacacagatcatagctctacaggagtttatgaatttgaagcttatgggattttggcagagaaattttcagctgtgcttgatacccaccaaaagaatgtatctcgaaagaatgaaggaagaagaaaaaaggatccttgatgtttgtgacaagaaaatgagaaagttagtatctgcaatacagagcttgttcctgttcagtgactgaccctctgtattctgtatagacaccaggccgatacacagtggagttcccaggccttgtttgcaggaagccgactgtaaagacagccccagctcaaggctattaggttgaatatttgctttcatgagtaaatgtggatctttggggaatggcttcaaaataagtcacgaacacaaattctttgtaaattatgtaaattcctgtttatataaattggcaacaacttataccgtctgacagttcaaaatctctttcagctgcgctcttcccaccgagccgagcttactgtgagtgtggagatgttatcccaccatgtaaagtcgcctgcgcaggggagggctgcccatctccccaacccagtcacagagagataggaaacggcatttgagtgggtgtccagggccccgtagagagacatttaagatggtgtatgacagagcattggccttgaccaaatgttaaatcctctgtgtgtatttcataagttattacaggtataaaagtgatgacctatcatgaggaaatgaaagtggctgatttgctggtaggattttgtacagtttagagaagcgattatttattgtgaaactgttctccactccaactcctttatgtggatctgttcaaagtagtcactgtatatacgtatagagaggtagataggtaggtagattttaaattgcattctgaatacaaactcatactccttagagcttgaattacatttttaaaatgcatatgtgctgtttggcaccgtggcaagatggtatcagagagaaacccatcaattgctcaaatactcagaaagtactgtcaaaagcctaataaaaaacctaaagtttgctctgatttgtgggtttttttcctcactgtctttatgtgcggggttgcgcatcaacttttcatggacctctggagaggacgggaagaagttgtggtttgggaagtggaatccatctaaagtcagttatggagctagatgaggggctgcctgaatattaaggaagaagtggggtttggggaccgttccaagaagataaaacattcacagcagtcaggaagagagaaacctggggagagagctggttcttcccctaggccattgtgccttcctagcaatagggaggcttccttgtggccctgccaaagatgcctgtgcagcccaggattctagggagagggcactgctggggggctcaggattctatggagagcactgctggagggctcaggattccagggagagggcactgctggggggctcaggattctacggagagcactgctggagggctgaggattctagggagagcactgctggggggctcaggattctagagagagggcactgctggggggctcaggattctagggagagcactgctggggggctcaggattctagggagagggcactgatgggtggctcaggattttacggggagagcactgctggggcgctcaggattctagggggagagcactgctggggggctcaggagtctatggaaagcactgctggggggctcaggattctagggagagcactgctggggggctgaggattctagggagagggcactgctggggggctcaggattctagagagagggcactgctgggggctcaggattctagggagagcactgctggggggctcaggattctagggagagggcactgatgggtggctcaggattttagggggagagcactgctggggcgctcaggattctagggggagagcactgctgggggctcaggattctatggaaagcactgctggggggctcaggattctagggagagggcactgcgagggagctcgattctaggagagggcactgctgggggggctaaggattctagagacagggcactgctgggggctcaggattctagtgagagggcactgctgggggctcaggattctagggaaagggtgtggctgctgagttcttgataaccagaagacagcaatgatcacacctgcaagtctttaaagcttataagacgtcttgggggattggggatgttcggaaagagtggggtttccttcattttctttcttacttcctttcctaccttctccacctgccttttgaataaagaatcagagaccgtgggaggcagggaattggacaaagacaggcccagccaaagagcaaagagaaatccaagaagaggagtaggtttgagtttgatggctacctgatctgagaaaacccaggagcctcttgttttaattaaagtcatcttagagagttttgactttgatggactgagagcgttgggttttttctgcaggatgtggggcagcacacagcaggagctgcagcgttcactcgaggcactaacaggtcctggagtccaggagctgcccaggtgccacggaggccccaggcagaggaggacagccaaggacttccaggagtcatgggcagtccgaggcccagacgtggcaggcttttctggcatctgggtggaggaatgaaggagcagtctatggatttatgagcaggattggctatggaaactgtagggcccctggcttagaaggagtaagaacttcagatcgtgcattaaaccacgggcgtccagcccttctgagcccgggatcctgttcacctgtgaaggttgcctcagctgaagcccagcaaaaaaaggctgtggagtctggagacctggatttgacaccatgtcctttagggaaaccagctttaaactctcccagcctcagtttctttcttttaccttttcttcttttttctatgtgtttgtctatctgcgaatatctttattttgaaatttataaatgatagtttttctggggagagaattttaagttgacagtagtagccccttagatggaggatgttatttcattgtcttttgaggtcagttattgctggttagaaattttctctgagacaaatcataggttaatttctggtggctttaatgtttttctctttatcctagacattctgcagtttcagtataaggtgtccaggcagagatttccattcaatttataccagatagaattggtttgacttttcagttgaagggcctctttcctccacttgtttctggaagacttagtgtcctcctccaacgttgccactccactgttctctggcatctctggagtgcctgtttaaactacttgaagtgcctattttctccatttctcctttgcctgaatattttgatattttcttttttcccctatttttgagtctgagtttagtattgaaaacccgggactgtcattagagacagttgtgggttatcgaggggttacatttctccgggaagcttgttcctgtcagtcaatccacggtgtttcctaggatctctccttgcacaaggtgtgtgtgaggagcccaggacacacaagaataagtctccaatttgttcgaagtatatgcaattgttttaagccctcaacgtaattccatgatgtctgtattatttgtgtcctcattttatggattatgaggaaaaccggggcacagaggggttaccagcctatggccacatagctagaaattggtcctcacctgaacacattgtgcctacctgtactactgtataattagttaatggcagctgagggtgaggaatgaaggctcagaataattttatggagaaggtatttttaattaaaacattgagcaagtaaaactctttgattgaaaaattgaaactattaaaacattctacgtagggacttcttgccccctccctgtcctgtcctccctgcctcacctccacccccagaaaaccactgtcatgactgtctggagtaccttttcatctgcattgtgtgagtaggagcaaacaggaacatgtagtcttgcttctcactacttttccacacaagttagcatataacacttctcactactttctcacacaagttggcctataacactgtcttcctctgacaccacctttgccaccgagggtgtgggtttttttcctgacaccaaatacatgttgttttcccacaccagttatccaattctacaacaccaaccgagtgtccaacaactgaacccaattctgactttatctatgtggagttagcatcagagccagcaagctaaggtctcaatcctgcaagattgcccctacttcagacaccagccacacaagtggggtttccagcagatccacatttcttcccagcctactacaaatttgggggttccataatctaagctatacccccatgtttgagaactcatcagaacaattcccagaactcagggaagtactgtgcatacaacttcagctttcctataaagggtgtgacccaggaacagccccatggaaaacaggcaaagaatgaagccctgggagaggaggtttccacgctccagtacatccatgggttggccatcgtcgaagctccctgaacttacttaaggcttcttatggcggtttcattacctaggcctgattgattaaatcattggccattggtgactgaactcaagccagaggtcagggtatggaacagaaagtccaagggcagggggagagctttgtccccagttactcctgtgtaagtgctggctccattgtgattgggccagcgtgggtactgtgtccatcctgagctaatcaatgggcttgaaggttaccatgtaaggagtggcctaggctctcatactcagcttttggacccaaaggaagtttggatgctttttccagaggaagggaaaatggataatgagcagcaaaacccatcaagggccattgggaggtacctggtaacccaagagccttgactaggacagtgtgcctgtctagaattaacgcagattaaatgcttcttccaagagaagccatggatggtttccatcagtatccagcctccaatatgaaatgcatctcaacaggcttatcagatacttctttccaaccatatgtgttgtccatgtttctcactagagaagacctggtgacatcttcctttatttctctctgtaacctgtggtccagcagacagcctaatgttataagtaggggaaagagatgatttttttttttttttgagatggagtctcgctctgtcacccaggctggagtgcagtggcgctatctcagctcactgcaagctctgcctcccaggttcacgccgttctcctgcctcagcctcctgagtagctgggactacaggtgcccgccacctcgcccggcgaattttttgtatttttagtagagacggggtttcaccgtgttagccaggatggtctcaatctcccgacctcatgatctgcccgcctcagcctcccaaagtgctgggattacaggcatgagtccccacacctggccgaaagagatgatttaatgggaaaattgcattctgtttttgaaagtgtcagaggagacttgctcccaaatcacaatgcaatgacaagccagcggccagtgagcgagtgacatcatgacagggatgcccaaggaattattatcacaaccatatcccagtcatacctgaggtcagagtatctggagttcaaaaattcaaccttaaatatcttaaatgtgcattcacttggttgctaggatcaaaaaccaggggacccttcttcctggtaattaattgattaaccttgggacctggaatcagggatccctacttataggtataggtttcagataaggaaacatcagtctgcattggaattgctattggacattctccaaagtgatttaataacagaggcacttcctagtggctcaggcagcttcagatatgacttgagtttagaactgtggtggatgagccttttctcttggcaaatactaagtcagcattaaaaaaaaagaaaaagaaaaaagccagttcttaagaatctcctatttcccaagcacttaagtcaaagtgagggtaactccttcacagggctatgaggccttccgtgatctggcccttgttcatctctgcaggctcatggcacccgagtgctcctgaaactccagccacaagaggctccttgcagctgccggaattcctgtccaccttgtgaccttcagttagattgtttttctgcctagaacgctcttctttcttctcctcctacctccacatcccctggctagcatagattccatcccctcctggtctgggtccagcccctccatggctctgtgtttgatagcacttatcacaggatagcatggcaggccatcgcccactgtccagtctcaaagccgagccacacagaagcacagtccaggcaccaaaaggtgacgtgagggctctacttaatctcccacatgctgcaaagagagagatgaagatgatccatgcttggtaaaattttcccgttttctctcttgcttgcttccttcacccctgcagctgctcccccctctctctcgacacctctttaaccatgtcttgcagaatcctaccggagagcctcttgtcctcagctcttttccccagttctacctcccagagggtctggagagctggcccagtgtgtagagatcctctggggtggtggggagggtgaggcagtagaaaacaaagccaaagggagaggaaggcccaaggctggagacctcgtggttaatttgtaaatagtttatcttctgcatacttattttgtcactttaaaacataacttatcccctctgttcgtctcccctgggagggtagagttgatgtctgttgtgtttgctgctgtaatcttagtacttagacaagtacttagcacttgattgcactccgtaaacatttgttgagtgaaggaagacacaaagataagcaccacatggtctgtgccttgagggactcacagtctagtgaaaaggcaagcaaacaaacagaccgatgtcggcccaggagctcagggactgacagagtgcaacggaacccaaggggaagcaggtccctgctggatcggcgcagtgtagacacctgctacctgacaaggctctcctgtctggggacgtaggctctaggagccaccacatgtgttcatcaaaaggcatgctggtgtttcttgattcagatcagtactaattgtctcctcaggggaactcgcagttctcattttctcagcaatcgggtgcaatgagcctgcagaagaagcttttccagagctgttgtaagacttctgcaggccctgggcgcagtcattttcagaggtttcaggccacggcacggcgatgccatgaaaacgcggatgcatcccatgctaggtaattatcggaggactgtaagattttccaaaatgtttaccatatttcctgggaaaattatgtggaattgggctcagtaaaagtgacaaagaaaaaaatatatatatatataggctgaatcttgctctgttgccaaggttggaatacagtggtgtgatttcagctcactgcaacctccacctcccaggttcaagtgattctcctgcctcagcccccacgagtagctgggattacaggtgtgcgccatcacgccaggccaatttctgtaattttagtagagacggagtttcaccatgttggccaggctggtctcaaactcctgacctgaagtgatccgcccacctcggcctcctaaagtgctgggattaccggtgtgagccaccacgtccggctgacaaagataataataatttgaattttcttatgatttttaaattttttgatttcattaaaaagaagttatttattttgcttgtgagcacaaaattatacgtaattcatatggttacatattaatagagtcacagttgactagttgacataatgttttgttttgaaggcatgtaatgaggcagttatcagttttattttgcaaggttgtttttgttttcaccttgctttgctttgttttgtattttggagccaatggattctatttgtttcggccctcagatacaggcccttggaaggctcctaagccatagctttgttactgttaggaattgtctgaggctaaagcagctctgggctgccgtatggttcttttctgtgtgggtccaagtgttgcctaaattcaaatgatcaatcaagagagaaagcaaaatgcttgatgttttgttagctttgtgtcagtgagctattgctttacagcagatcaccccaaaatttagtggcttaaaaaataatctccctcccaccactcccccataaatgagtgtttctgctcatctgggctgagctgggctgatcttgactgggctagctggtgcatctgccgtcagctggtagcttgacctgggactggctggtctggtgtggccctggctggggtgacttggctctgctccacatagtcactcatctgcagggtagcctggtttgtcctcatgggtagcctggcttgcccccacagtgggggtgaggggcccagcgggggagaaaagtgttacgttcagagacttgggtctccaaggcctggctcctttatgttctattatttgaagcaagtcaaaaagcagcccagattcaagctgcatgggaataaactctacctcttgatagcaggggccataaaatcacattacaaagggtgtggatgtagaacgagggggagaattggagttatatcttcgtcacagctgactagcaaatctatgatttatttgtgtttcaatattacaaggaaatgtttagccctcacagaaaatattcctttgctatattcaaatcctgtctgttctatacaacgtaatcgatgttaccttgatctatgtcaaatggcaatgatgcaaaatgcacatttgctaaaatgctcttttaccacatggagcggcgtggcatcaatgtgcgcaccctggccctcgtgttttatcagaagcctcgaaggctggcgagtgagagctcgggctccaggctctgtaactctggttttccccagttgttttctaggtgttgtttgagtaactaagttagcctctctgagctctaatacttttgtgacctggagagagcaaggttaccttcctcacggagtcgtcgtgcgcattgaatgcacatcaagcgcttggcacagggccagacaggttgataaatgtttgctcttattgagctcagaatcaagtctgtgttcagggaaagtttgttgaatgaatcaattaatgatgcaagcccagcttttccaagggcagagaatctgtgaggaaaagaaagcatagaaatgtatgcacccttttggggtctctttcagaagaaaactgcttcctcatctcctgtcttatgttgagtgcctgtgttgttatatagctaacaggtgaataaccaagacaattgaaggatgggaagagggctttttctcagatctctaaaatgcttttcttcccctgttagaatactaaagccatgatgacagcaaagggtgacagaatatgattggaggagtcccaagctctttttgatccaggcttggatggggctgggggaaagctcctcttctgatggacagtcattgctggaagacagatgggacataattgtgggggcccctgtgggagaggtttgaaatgtctcagggaaagacgggactgtgaagggatcccctgaggacactggtaacatttgcagtgggacactttggctcacaaggaagcttctgggcatgggaatttcagagcccagatggtgggaaaatcctcaaaaaaccttgggatttgggtctctgcagctgggcagcagctgtgggcctggaattagcgccaaccacaggtggtaccacctgttccagtgaccacatgtttcccaccctcgtcacggaggcccagccatttctccctcagagttttgggaaatgtggaagaagaatgggaggagaccatttgttgaaaggattagggagatgggtgttcagcctggaagcctcccagaggctcagggttagttaccaaaaaagcccagaacagcagaatttgtgctgttttccctgatgcctcaattaaatcatcctctgacgtcacattttctgcacctgcagggtttgcggtcaacacatggtaatgtgggctccataaatttagagtgtataattgttctgacacggcatggattggagcttctttctgaattatctatgaaaaagcaaattaagagcataatcctgactgcatgggatgtgcccagccttctaacaggaacaaactctttcctggccttttcaaagtatctgttactatgtaataaattaatagggtaattacaaatggttcttttccaggtctaccagatttctgatggaccatattctcttagttcttattgtacttgaagtaatacttaaggtcacacacggtagcactttaaagtagctaattacaactgtttcctttatgatgcacatggaaaaacttcttcacctgcgatgaaactgaatagctgttaaggctcgtgtctagattcaggcagctttgttttctaccccagctggcctggttggttccttaatttctctgagcctcactttttctgcctgtaaaacgggaatgatcatatacccaaggcctcctgccaacagtcagcaccaatgtgccaggtggaccactggaggactgcagcctcatgaaagatcccaagctagagccacccagctaagcctctctagatttcttggcctgcagaaacttttaagataatacatgcttttgtattctaagtaaattaatactacttataatggtactgacatataggattaccgaggaagacattcatcagcgaagagcaagtactgagtacggtcttagcataagtatgcgtacatggtaaaggtaggaagttttacactaatgtttgaaaggaaaatgtagataaaatgtacatgctcacaaatgggaattgaggtagggttgccaaatttcacaaatagaaatccaggaaacccagttacatttacatttcagttgaacaatacataaaatgttagtagaagtatgttccgtgtaataatgggatagtcactgaaaaattatcacgacttacccaaagttcaaatttaactgtgttctgtattttatctagtaatctagatcgaggcgacttacttcctcatgatccaatgggcatctgtctctgatgtggttcatctctttattccctaattgaaaaaatataaattttttaatactaacatgaattttggcattttttaaaaacctggcaataatacagaggaattgacattctcacagcataccagtagaagtgtaagttggaattggttattatataaacagtttgtcaaaatgattgaagaacttgaaaatgttcataccccaagttttgattacaaagatatttaccataatgttacttaaaaatcacaaaatacccggaaaaaacccattgcttaaatgatagtaataatctgacatatttctctacatttgccagcaaaaatcaagacatcctctgaagactgtccatgaagattttgttggagtgagaaaaaataagcaataaaaatgtagtcttcttgtttggctatagtctggcctggaatggatattttggaagtgactcctcacgtgcaggaaggactcttaggccgtatgtgtgggcctctccgaagttcaaagctgatttatagagcatcagcgctgactccttgacagagagtctgcgggtcagaggaacttgaagtcagaatgtgagactgaagtctcaggaacacacagaattcatatcaagttccttttacacataacttgttaagaagagcatgtttgcctaaagtggggtgctcctcacagattctgggagtacagaagagctcaggaaatgctggggacagagtggaggctgcgctgggaggaccctggtgtggtttcaatatcagcttggtgccaggttctctgtagcaccttctttctctgtgaaagtggccaactgttgctgaatcctggaatgttggatgggcgaacgggagcctgaccaagcccaggctggaattcacagcctgattctgggaactgatgggttattgattccctgtggcattgacttacatgagctgataccccttggccattggttgggggctcaaagagtttagggcgagggtacctaagaggacagagaagatggaggagtacagcatgcagttcatcccttccctgtccaccgctgtggtgtgatttcagccactgaggttgattgaggtggactgtgagctcctccctccagctaggcagacatggggcctacaggaggcagacaggtgtcaggcttaggagagggctctgtggttccttctgctgcaaaccctggcgcagcttcagggccaacttacccgcttggcacagtgagcacagggcctagggcccatgaaacttttagggtcctatgaaaatgttttaatttctttttttttttgagacggagtctcgctctgtcgcccaggccggactgcggactgcagtggcgcaatctcggctcactgcaagctccgcttcccgggttcacgccattctcctgcctcagcctcccgagtagctgggactacaggcgcccgccaccgcgcccggctaatttttttctgtatttttagtagagacggggtttaatttctttttttttccttctttctttctttctttttctttctttctttctttttttgagacagagtattgctctgttacccaggctggagtgcagtggtgccatctcggctcactgcaacctctgcctcctgggttcaagtgatctcctgcctcagcctcccgagtagctgggattacaggcatgtgccaccatgcccagctaatttttgtatttttagtagagacagggtttctccatgttggccaggctggtcttgaattcttaacctcaggagatccgcccacctcagcctcccaaagtaccgggattacaggcatgagccactgcgcctggccgaaaatgttttaatttcttttaaaatcagatgaaaaagtgaacattgtaataatactgaatatggatctcctccataatgtgatgggctatgtgaccttgggcaacttactttgcctctctgggcccctgtttggctgtctgtagttaaacggaccacctcatctctgggacttcaaaagaggagaggacggtcagcaggggtggcctgctcagaagggccatactttgtccccaacatccctcaacaaccccaagggcaatgccaccccagacctcactgccaggccttccagagtccaataaactcatgtcccatgaccacagcttgttcccttgatctatgtgcacctggggatgctggtggctgggaggtgagttcatgaggcctcagatccgcccttgaagtcagtactgacattcacccattcttcagacgaggacatagaggcctgggaagagtcagcaaggacagaagctgggttcacagccccccaggccagctccagaggcctcaatcttcaccagcaatgtgcctctgggcttgagaagattggacaggaagaacacaggaagctccaagaaaaaagaactgaaactgcaccaagagtcaatgatctgctgcctcctcagacgtgcagcaatctgacaacatccatcaaaattaaaagcgcgtgcacccttgacttcacaatggccttctaggaatttaccctcccaacgcactagtgcacgtgtctaagatacaaggttctgccgtagcagaactgcttacggcaatgagtttatggctgcccacacccccagcctcaagtgaggaggctccaactccacagcaggttggcaggggctgagctgtgcccctccactcaatggaaatatttcctggaccaaaacggaactgcaccagggaccaagacagacaggacctcctccaccccgtggaaggtaacatggagagaggtcccagtggatccaccaaagaaaaggaatgtccatcttatctttcacctagagtgggatccagtgcaaaccagcacacacaggaggatccactgtagttgctggaatgtaagatggacataccgtgtgtgtatgtatgggaaacttctggaaaatgcaatgttggggtgaaggaggtaggaggctttttcttcctattcttatgtccttcagtcatggttcatttggttttgcactctcatgagcatatattattttatacttaaaaaaaagggattgcatttcaaaacttccatgaccagctccgaagtcagtgggtcagagggaattccctgctcactcctggaacagacccatccagccccctgccaccttcctgggctctgcaggaaccacattcacgccaagtttggaagcagctgggttatgtgctctttacaccagtgctgctggacatagacttgggaatcctttttatggaggagagggacaaggaaggcagaagcgcctggggcccaagcatgttaccttctcagcaaccgctgtactctgcacatttgttttcttgtggaagttctggaagaaggtggaggaggcttgtcctgaaaaggctggtggggccagaggatggccagtggacctgctatctgcactcctcgagatggccatggggagccccagagattctacccatgtgggtgggggtaggagcagcaagttaggtctggtaaatgttaaccctcctttagttgcacatgcaggctgggatcattcagaagagactttagtatttggaagcagtgttaatccaccactagcaagagccagccctcaccccacacatgcatggcaccatctttgccggcactgcctgcagaggcctaagtgctctgggctggaaacttggccccactcctctgaatgaccaaggcaagttctttgatcactgcctcagtatccccatttgcactgtagggatagtgataacactttctcatgggatggttgtgagaactaaatgagataatgcattatatgttcttagaataatgtgtgctaggcacatgttatcaataaaaataatgagaaggagacaaaaagaaggggatctgccttgcaatcttttcatgtgtctgctatgaaacaatgtcacatccatcatgatgggcagccccattgtgtggagcataagtcactttggggcctttccaaatctcaacggggatgcaagctggctggagaaggactctctgggttactgagacatgccctgtgtcagactgggtggcccagagatgtcatctttgcaaagaatggtgtgttgcaagagaagagatgggacgctgatgagcagggagggtgtcagggttcagctatgtggggacaagctcactgtgtagcaaaacaacatctgcacccagcatggggagactgagggtgtttgctagggagcagctggggagatggatcctgatgaaaaggaagtcttccagccagtccttcagacagctccgaaggacaccggagccaagagggccttgtggtaacaattttgcagagccaatggagcacggccctggtgctctggggttgatcctcgctttctagaagctgatcctacgggtagcggcatccaggaagccttctgcagcgtggtcaaagcactaagagatgagaagctattgcaagagccctagggggctaatccattctagagaccacagcacatgtggcgattaagcctgcaggcctagaggaggggcgttgggtgcaaaccctggctcctaaccaaaaggctttttgacttgaggcaagtaattcaacctgtctgtgccttgtttccttctctgcagttcttgtgagggttcgatgatatgataagggttttaaaagcaggtgcaagctccctgtgatcattcttttgcctcagtatcccggcaggcattgagaaggctgcttggaggaaggagcctttgagtagggcctcaaaggatgaggaggtgtaccccaagacggaggggcgttgagacagagggaaagcatgtatgcagtcccatggctaggatttgggggtggagtgtgtttgagagtgtgagtgtgtgcatctgtgtgagtttgtgcgtgtgaatgtgagtatgagtatgtgtgtctgtgtgtgcatgtgtgtgagtgtgcatgcatgtgtgtgcttgtatgagtgtgagagtatatgtgtatgtgtttgagtctgtgtgcttgtgtgtgtgtgcatgtgagtgtatgtgtgtttgtatgtggcctgtgtgtatgtgtgtgtgcttatatgagtgtatatgagtgtgtgctgtgtgagtgtgcatgtgtatgagtgtgcgtgtgctgtgagtgtgcatgtgtgtgtgggtgggtatgcatgtgtgagtgtatatgagtgtgtgctgtgtgagtgtgcatgtgtatgagtgtgcgtgtgctgtgagtgtgcatgtgtgtgtgggtgggtatgcatgtgtgagtgtatatgagtgtgtgctgtgtgagtgtgcattgtgtgagtgtgtgtgtgactgtgtgggtgggtatgcatgtgtgagtgtataagtgtatgtgcttgtgtgtgcatgtgtgtatgggggtgtgactgtaggcatgtgtagtgtgtgagtgtgtatgtgcttcgtgtgcttgtgtgagtgtatatgagtgagtgcatgcttgtgtgagtgtgcatgagggggtgtgtaggaatgtgtgagtgtatgagtgtgtatgtgcttgtgtgagtgtgtgtgcatgtgagtgtgcatgtgtatgaatgtgtgtgcatgcatgtgtgtgtctgttgctaagggagaggacttagcattagtgagcagcaggagacgaaaggggaagcaagtttggggttcatgcagtcatgtgacaggctctggggcttcctctgcaggccttagggaacaagcctggtttggaagcactgaggctgaggtggtggtgacaggccctcacttggtttcaccctgggggtgtaggtgggcacaggaacaatagctgagcaagcaagaggggacagaggctgcatgcagggcctgagccacctagaaggaggctgctttcccagcccggccctcccgcagcgcctgtgtgctcataggaaaatcctcctcccgagagatttatggctggcggctgcgacagctctcgtgtcctttgcagggggagcttggctactcctgccttgggcttaggcagagcgcagttctctctcagaaagtctagagcctcgcagctgagcagagctttggggcagccccaggttgctctgtgaaacaaggtgccaccaggcagccaaggtgacaaggggcccgccatctgacagggtggcttggatttggaggaggtcactggacgtccgtgcggatggcccggggccctggcgtgtgtcctcctctcatctgcacctggtccttgccccagcagctgagtgtgttgttggggaaggaaatgagaacaaggagtgccctcctggggatgccgtgagggtggcgcagcatctgctttgcactgggcccatgtcgctcctttgccaggtatgtgagctggctcagccctgtggggagcagacacttgggcatgtgcttggagacatggcttttgacactcgccgtcctttactgagctctgcgcactggccctgggctgtgcactcagctcgccttgtcccactgaacctcaccacattcccctggggaagggacggtcgctgactcccttctgcagatgtgggaactggggaaagtagtaaaattcaggaggaagtgggcgaggctgacttggactttggacctttgtcttgagagtccacaagcttggccttgtcgccatttctttgggcaagggtttctcagcctcagcactcctgacattttgtgcagatcgtcctctgtggtggggccatcctgtgcattgcggggtgttcagcagcatccctggcctcaacccactacatgccagtaggtccctccaggtgtgacaaccaaagatgtcaccttgagggcaggtgtgacaaccaaagatgtcaccttgagggcaggtgtcacaaccaaagatgtcaccttgagggcacagtcacttctggctgagacccactgctttagggaaaggctaagatgacctcgaaatgtcaccaccttccccttttcctccaaccccagccctagtgccaaccctctctgctttcctaacctgctgacagtgagctctcagattctgtcgcctgcatgagggtgagcctccatcagcctggagagacagtcctggaagtggacacttctgcctgcctttctggtcactggtgctgccttgagcagagtgcctgtgagttttgggggattggaacgagccttcagcacctccccgtgccactctagcaagccttgggtcacactcaggctaagttgtctgagggattgagagggtgacaagatcccagggatgttgaaagttgtctgtagaacactagtgagagcatggggacgttggcgccccaacactctgccggcagaagtcagaacaaagcctcctgtcattgggagctggggcccagacttgaagctcatgtgttctttgatccagctgttcacctctgggaagaatcccacagaagtgtaggcatgtctgctgaaggctcttcattccagccactgtgtgacagtgtgaggaagaggaaatgagtgctgaacagcaaaaatacaaaaaagaaaagccaatggctgctgtacagatgacgatagactggttaccagtctctatggttttcctctctccctgtagctgtaaaattagcaatgtgacttcgtggcatctcccatcgagaagtgcagaccttgaatacaggctggtctggggcttgctctggtcaaggggcagaatgaatgacagtcagcctaaaatgaatgacagccagcctagaatgaatgacagccagcctaaaatgaatgatagccagcctagagttccacacatcgggagacttgcttgattctgagctctcaaaaccctgtctagccaccatgagaacaagcctggactgggctgcagagggtgagaaaccaggaggaggagaacccagctgtcccagtcaaggccaatctcgtctgctgacagccagccaaaccccaaacacaagagagagcccagccaagtacagcagagttgtacatctgaactacacctgaccacagatgagtaagtccagagagtctagaagaaccaccctgcttacccccagactcacaaacaatcatcagtgtgtcttgtttcataacattaagtttggggcttgtttgttacgcagcaaaagcagactgataaacagtgaatagatcaaggctcagatggaagagctggtttgcttgaagtcacattactagttgatcttggatccagagtgtagaccctggccctagtggagtcagttcccgtaataacataaccagagtcaataaggggtttaatgaaacaaccttaaaaaacttccggtagaaataagcttcacgtcatgactgcacgtggcccagaatctctgcagtggccctcagcttctaggctgagcagcaagagaacatctgggcatgtttatagctcagactctatttcttagcgctttgtgggggttcctggctcatggaaatgaacatcttgggctgcactgaggcaagagaaatgcaatagaggcaaggattccaaaaacagctctaatacaagtaacagcaaagctcccttcatggaacacacggctgggaggacctcgccattctggaaaggcaaggctcagtgggggagatgtgaatgctcttccctgatttgggggcttggtcctagggagccaaggctgtgcatcacgaacggaggccttgggggaaggtgggcagtggagtagcagcttggactcagtgccatcctgcagaacttctttgatctcagctttcccttggtaacataggggtaataattgtccttccccattaggcaaagaagcaagagaacagtgttcctgaaagaaaaaaggctgtgcagaaaactgtagcatacttgtcaagtctgtgcactttaggtcaggtatggttcttgcctcttaagaaccgtgtcaacctggataagttgcttaacttttggaaccttgtttttgtcattgtaaaagggagggagcatttgaccatgagaatacaaggacagtgatcatggacggaggccatggtaagcttcttccccagattcccctaccctagtgctttagcccgggacctgtcatgttataggctctggataaatcatggctgaattcactgaaaaaaatagtcaccattcactgaatacctactacatgccatgtagtttataaaggaaagaggtttaattgactcagagttcagcatggctggagaggcctcaggagacttaacaatcatggcagaaggggaagcaaatatgttcttcttcacatggcagcaggaagagaagtgagagcgaagtgaagggggaagccccttgtgaaaccatcagatctcaattacttttaccatacgggggagactacccccatgatttaattatctctacctggccctgcccttgacacatggggattattacaattcaagatgagatttgggtggagacacagccaaaccatatcacagaccaagtaggatatgcatacacatataatgaactggctcccatgactgtgagagctggcatgtctgacctctgcagggcaggccagtaagctggaaactgaggtagcaattctatgtcacagtctcaaggcagaattccttcttatttaggaaacctcagtttttgctcttagctccttcaactgattggctgaggatcatccccattattgagggtaacctccttaaagtcaactgattgcaaaggtgagtcatttctacaagtatcttcactgcaacatttcaatgagtgtttggccaaacaactggcaccatagcctggctgccagattctggtttgtgctgctgggtgacagccaagaccacctatactccttctctgcataggtgtgcagagaaggagcaggtttggggggccattatcacacacctcatattctaaaggcaggctgtttccacaccatgacactgtttccacaaatgtgctttataagcagcttactttgtggctggtgattcccttctgggggaaaattgcctcctctccctcattctttcaagattgatcaagaccagatgtgtgtgtgtgtgtgtgtgtgtgtgtggtgggggcagtgaagggtgactggataaagatgtgaatttagaccccagctccattccagagccaaccaaattgtaattcactctcagcttttcctaatattaggtttgtgccaaagcaattgcggtttttgccattaaagtaatgccggtaaagtaatggcaaaaatggcaattgcttttgcaccaacctaatagaatagagtcaaatgcaaaatcccacgccagtagcaaacggtccctcgctgctctcccagtctccctgggcagcgggacccacaagcacagccctctcctcctgtatgccattctgtgggattctggaaagtccaaagggatgatctagggcaaagaatcacccatggcccggcaccacgagggccggaatagtacatgcctgaggcctgggtccaggacttgcttccaaaattgcactcaaggctctcttgcctttgggataaaagaccaattctctgataaggcttgtgatattgatttttaaaaagtcaaaagaagaatatttttttgatacaaataatgatatgaaattcaaattctggtgtccacaaataaagttttattggaacacattcatgcctgttcatctgccaattgtctgtggctgctttcttgacacaatggcagagttgagtagttttaataaccatgtgactcacaaagtctaagatacatactacatggccttttacggaaagatttcctgttcccctacccccgtttagaattgtgcagccttccctgctggttattaaataaccaccaccctgagctcccaaaagcccacttctaaccctccccaggaaccttcgggacctctcccaatctatggataaagcttgtctgtctggagagctctggaaccctgtgagagcctacgcacgtgttgttctcattgatggtgcccactttgtatctgtgcattgtagtttgagtcccatccctgattttctcactgctccttcaaagatgcttcctccctgcctcagagtcttagcccatgctgttacttgtgcctgggatgtgcttccctacatctccaccaccatgcaccaagtctgcaaattccttctcatcctcagatcttgtctgaagtatcaagagggcctcttgtcctccaacattaggtctggtccttcattacacactttggaggaaggtcactgtgcagccacacttaagaagtagccggtcatcctccatctccccgagggcacagtatctacataaactatttggaattcttctgcctgggagatttatctctgttctcgaatttatttacttagtcaatcatttatttaatcagtgtggtctcatggatatttatttttactttgggttacaattcaataacattttatgtattttattgcacaaattgtcccagctttgggcacggggagctctttcagctggctcctgtgtccctttgacatagtctcatcgttgttagtgggatctttattacttgctttaccatttccttactttctggcactataagacaccccaaggtcatcttgtatcagtcctacaagaagctactttcccaagggtcctttgttccttttactggacaatgatattagaaaccaagatctgggtacaggtgggctcattgctatagggatgctgttgcttgtagactatctcagctgacagagtaaggggatccgattgtgcatattaacccatgtatatgcacagatctataaatatttttatttggaaccacctgtatccatgtaaagctcaacgtgagttcacactaatgtctccaactctaatccatcaccacatggatcatttggcctccaccccttgcttatctcactccagtggtgaaaagctggtgttcaccatcttctgtccatttacttcattattcagttgccagggacatggatattagtaacagaattattcaatggtgcctctcttgaccctgtgggaagcaaccttatcagctcgagtcaagtgcttctgtacagttccttttgtctttagtgttactgacttcactcatttccaaagttactaaagtcagtacctttccttttctgtggggttgtctcaaacatttgcaatgcatttagattgtttggtcacattgtgcccttccttttgggatgagggattcttttcatgagttaagcactggggctctggctttctagagaaggggcatggaaagtctgtgtggggtacttagcagaggagagaaggaggatgacagcacccttgatggtgacactacctcactagccccctggcctggatttaaagtttggatggtgagaggttttaaggccacaaacaaaggacattgatttccacagggattttgcaagactctgggctcaagcagccccatttttgtgcccaggtgataaattatgaccacaagttggggagaggaatccatcctaactcttggttttctagggtttgtggaactggggttactggaaggcagctcctttggcagatgcatctatcaccctggccaacatcgagagtcccttgggcagctcctggagagggaagacactgagatgcacaagaggtggcagagacagaagggccgatcagggagggtcctttgagaggactgaagctggcaggctccagggtcatccagacatacttggggcctctgtaaggggctagattgggtcctgggtaggtactgaggttcataaccagcatcacgtctcaacacaaatgttcatctgcccccatgggtgtctactataggttgatgaggcacaggagagtggagggggtttggaccagagctgttcttattcctgctctgctgcctgctagccctgtggccttgagccaagcatgtaactccttcaagcattaatttgctcatctttaaagtacggagaaataataatcatagtacctgccttaaagagttgtggtgaggatcaataaattaattcatttcattagaacagtgattggcacatagtaagggccctgcggaatgacaaaaatagtgatattgatgatgataatgataatagtgatggatgatgattatggtgataattggtgatgatgaagatgatattgatggtgataatgataatgatgggtgatgattatggtggtgattggtgatgatgattatgacaatgataatggtgatgattgatgttgataatgaagatgatgataatggtgattaatgataacagtgatgatgatgatgataatgatggtgaggatgatggtggggatgataatgaggaaatgatggatgatgactatggtgatgattgatgatgatggtaacaatgaggatgattgatgctgataatgaagatgatgatggtgatgataatgataattaatgatgatggtgatgatgaccatcatcacctcaggctattggggcctatgatattggggttacatttggaagaaattcatgattttcaccttgggagtatttatttgactcacatgctattgctgagtgggccaggaagcatgtgcagaactggaaattgagaacttgaagtttggttttggtcaagttccccagaagcagcccctaaaatgaaggtctgtgcataagtgattcattaaaggggcactcccccaaaaaactggtcaggtagagatagaaggtacagagagaaactggagagggaaggggaagagaccaaggaaaggtgaggcttcacctgagtcccagcttcagcctgagcctgtggggagctctggatcataaatcttatcttgaggttcgtcttgctcaagacaaaggagctgggcttctgcatttctgcgtcaatctaccctcggctgtgacctgccctgggggatgagggtttgagaaaccagactcccaggcactcctggccctcagtccaagtgagccattccagtagcacaggcatcatcctctaaagaagactgacactgtgagctgttagaagcaaacacacagaagccgggtggtggcgggtggggaggggacacacattagggagatcagaggcatgcgggtggagcactgatgtgtctgtgcaccacggagttcacatctactcttccagtaatggcatgtgatctcgagcaagacgcttcatatagtcactcactcaaatgttttcaggtactgactccaagccaagcacagtggatgggactccttggaagctgaatgtccagcatgtgcatctgactgactgacagctgtcacctgtgtgacactggggaaccgcctggagccctgggtcctccccctcacaagagaacctgttggaatattccaggaagtgattttgtttagacaggtaaccctgagcctactctaaattcatttgaaaaagtgaatcttcacacactttggtatttcttgagtgacattttcttgaacctcaccacacagttacaccaagtttaccgtaggactctggtccaggaagccttggctcccccatctgtaaagctcagggcttagatgaggagatcatcaaagctgcttctagcactgactttctaggacaccaagttaaaacaaacatgagtcaagcagttgattaaccccaggttctatttttccatttgaacactgaaggtttttcctagtggatcttaaaaacaaactccggaagggccttttaccttttccagggataatgtcgtaatctaaacaaatatgtaagaagcaaaaaacagaaatggtgagatgagaatttaatgtagcgtgcttgaggccctggatgatttatcactgtcctcgcagactgcacagcctcacaatgggttcgtgaatgtgtctctcctctcctcccccaaggatcttaggccaagcaggcccctttaacggagaaaccatttaacatgccagaaaaagtatgggtctgtgggccacccaggaggcaacccagcccttgaagatgtcagcgaagacacagagactcagagaagggcaacttcagagttggcctttggttcttttataggaattcctccccgcaggctgccctttcagggtgtgatagtgtggacaaatccactggaccaggtcactgttttacagctatcggggtgaccctgagccaatcaaagcaaagtacataagcatcatggcagtggagtccaagaaccatctgggtcatccccacacccacccctgtccctgccccaccatgttgattctcatcttaaactcatccgttgcatcttgcgctgcttcataaccttacccagtggcagatcataaaccagtgactcatgtgcttgtatatttagtgcccatctccttccccatgagactttaacttcttgggatagtgattcattcagtacatagagagatgagggctctgggaaggtttccaggagacagtcttcgtgggacctggggtcgtgttacttcacatcttctcatctgtgaagtggggctaataatagtccccaactcagagatgttcttactatttttattttagagatgaggaatttgcactctaaaatgtgataaccacccatctgaattattgccaagtcatcaagttatccattaatcatccatctatccatcaatttatcttttctccctccctcccttccctccatccagccgtcaaaccatccatccatccatccatccatccatccatccatccatccatccaacaatcactaagtattttatgagggaagtcggtgtatgaggctcttgggaacacaatagtgatcgcttcaggagatccttagctaatatagtgggaaaagaaaatcaaataaatacctatattccaacccagtcggattaagggtgctaacagaggattttggagcccaggacagggaggggcctattgtcctgagctggctaaagggaaacaggcaggagaagcaaattgggtgagtctcatgtgccagatcgtggagttggacccaacttgttagcccaaggaaactgtagtgcaggacatagaaagtgaaactaagttttaagagtgaaaaagaaacaaagaaacacgcctgtaattccagcactttgggaggccaaggcaggagaattgcttgagcccaggagttcaagaccagcctgggcatcctagcaagatctggtctcaaaaaaataaaaaaatcaaccaagcaaaggtggtgcctgcctgtagtcctagctacttggaaggctgaggtgggaggactgttcgagctcaggatatttgaggctgcagtgaactctgatcaaaccactgcactccagcctcggcaacagaacaagaccctgtttcccaaaaattaaaagatgaaaaagtgattttaccttcctctgaaactgcagcaactcttcatgatcctgagggcttgggagagtttaaacttgctttatctaatggggcatggctataacaacatgggcacgactctggaaatctttcatctgaagcgatgcagacactgcctccttcctttcaaggcagagctttatgcacctgggtcttgacatcggtgtggaatctcagaggaacctggggctgatatcactggaattaatctgagtaattagtaattagttcccaggagatggcagagctgataacatctttcttggtggtggaatttttccctcttgccctgtcccagagcacagttcatcctgcacccctgaatggctctatttctttccagtgatggttcacagactttcggggtctcccgccctaatcatgacgtgccctcctctgctccccttggggttggcctcccctgatagtgtgacaggttatttctttagtcattcaagctggttttcctcatatttttgcttgccccatttccggcagctcactgggcccctctgtgtccctgcagctttaggcagctgtgttacaggcgtccaggtggaagccacctgccggaacttcttcccttcccgaaaaacaagcccgtaatgaattggctgtgtgcatttcacagttttcacataaaacccaggattcctgacttctcccaaggaactgggcagtctggtcctgtgtctccacctggcaacaatgggctggagctggggaccaactgccgccttcaggaggcatgttcctgcctgcttgccactctccccacccagctgtgggcatatacagaactaaagtggggtgtcctggaggagagggggagggggaaggggaagggaagggcaaggagcaattcggcagagataggaaaaagatggggacggtgcaaggccattcattcctcactcggggaccatgacgggccacatgagagaggtcagatgcttgtaggagcagtatcagcctggtctcaacaatggggcaacgggcacctctctggtgagccgtgtggacaggtggacccagccataaggacctctcctatgctttggggctggcttggacctcagcacagccctgggggagtcccacagtgccatccagctggcatatggacacgtggaggtgaatttcgtccatggggagaagtaggagcctggctagttcttgcccctcttgagatgtggcctgagattctccctagctatgaggagcttgacagcctggggaacaggcccttttcccctgctctggatcgcccaggctctgcgcctggcagccatggcttcatttattgatcaaggtggcagcaattttctcatcacagaatctaacccagtgcacgcccctggtgtgtgtgtgtcttctgcttgctgtcagtgacaggtgaggcctggggtggtggatggggccagaaaggatggaagcctggggaggagacggttcccaaccctcatgcggctttcctccactattcctctgggccgactgggcttcatggaactctcgcggctgccccacttgatggatgaggacaccaggtctgagaacttcccaggtcacagggcagggattcagaccctaggccaggcctgaatcgtgcccactttagaacagggtggccttgttgctgggcattttctgcagtgccattgtgcctcatttgccttgtgtacacggggccgaccggtcatgcctgcgtgcgtgcacccagcagggccccgcaaagtcctacctgcttttctgtctgcctggagtgcgcaccctccactctcagcttaccacttattgcctcatcctaaataccccctttaggctttttgttttgctcttttagatgaagaaaactttgaaattaaaatgcaaaatcggatctttgccttttgtgataaaagcccatttcctcctcaatcaagcacaattatacaaaggtattcattgcatcacctggtaaagctgagatcaatatgaacaggctgggttttggcttccgtaactcccagcaccaagcctgggggctgtcaggagcctgaggcttcctggtttcaggtgcagccactctagtgcaggaggcaggccttcctcgtgactcctcctaggaagatgggccccacctgctgtgtttccagtcacgtagttgctgcggcgggtgggtctcctcccagtggacagtcaccccagagagcacagaccccagcactcccaggcctggcacctccaaggggccaagtgaataaagtaaatgagacgggtgaacacggctccacgggcgttaaggccatgggctcccacgctgcacgactttagtcctgcctctcctcgctctatgaccttgggcggcagccacggaactcacggagcctcagcttgctcatctcaaaagtggacgcgaccacgcagcctcttcccgtggggctgaggtgagcactcagtggaatgatcaccgtgcctcaggcaggacaagagccacggggactgtggctatttctaatatccttagtagtagtagtattaatggtgcacaggagtggggacagcgggagttctcaagggaccctccttgtcacggatgttatcgctgggacttggggatggcttcaagagccacaggaacattcaccaagtaactgctgggatccaggaaagcaagagggagatgccgctgggcctttccaatgacctctgcctgtctcccccaccacactcagctactgtggaagttgggagtttgagctgggccaggcttcctcttctctgcttaccgttgtctttgtgatgaatgcaaccctctctgtctctctccccatctcccctctctcccctctctccctctctctcactccctctccctctctccctctccctccctctctccctctctgcctctctccctctcccctctcttcctctccccctcccctctcttcctctccccctcccctctcttcctctccccctctccccctttccccctctccctctccccctctcccctctctccctctgtccccctccctcctctccctatctcccccctccctcctctctccctccctcctctgtccctctcctcctccctcctctgtccctctcccccctcctctctccctctccccccctcctctctccctctcccccctcctctctccctctcccccctcttctctccctctcccccccctctcttctcctctcctcttttcctctcctctctcctcctccccgactcccctctctccttctcccctctcttttcctcccctcttttcctcccctctcatttcctcccctctcttctcctccccccttttcctccactctcttttcttcccctatctttccctcccctctttttctctcctctctcccccactcccatctctccctctccccctcttcttcttccactctcttccctccctctcccctctctcccatctgtctctcctctgtcccctctctatcctctctctctcccctctctcctctctctcccctctgtcctgtcctgtctcttctctctccgtttcctcctgctcataggaaccagggctcacattctaaggaactaaaggccatgaagaaataccagggggtttcctccagagggtggaggttggcccctgtggctgccacgtggtgtcctgggggtgggcttggagttgctctgtgaagatccaggggacctgcatctggggttacttatggcacagtgctagaattctagaggggagccctctgggcactcctccaaggccacatcccagacgtggtgggagctgcagggtcaggtcatcgatggtgtatttcacgctaaccagatgtgggcgggcatgtgccctccagcagatccttcagaaggaaggaaggaagctgtcactgggccttcccaaggcaagcccaggctttctcacacaccatctcagtcagtcctcatcccatcctggtggagggatcaggatatcgtttcttcattgtgttgtgggggcaaaggcgtagcccatcatgcaggttgctggggtgccccacaggggcaaggcacagagagggcttagcagacagccaggcatgcagtgacactcaaaatggcagctgtttccatcccagtattcaaataaggaagtagaggccctgagaagttaagggcaaacaaggtcctggagaactggagtcaaggaacgtgtccccaagggagtgccagtaagcactggcagtgtggcagtgctggaaacaggacaggaaacaccacctgcagtggtgtcagtgcagcccgggatcctatactgcagccccaggaagctgctcaacgtctgcagctccttggcagccctctcttccatctggccctggctgtttgcctgtgctgggcaccattttgcttctggcactgcagtggaggtggggcgggaggcagggcaagggtgttcaccaggagctctggttgcactagggaaacccttctccttcccactgctccttcactgagctgagccctgtggggagagtgtgtgtgtgtggtgttttttttctgtttttttttttttggagacaggcccaggctggagtgcagtggtgtgatctcggctcactgccacctctgcctcctgggttcaagcggttctcctgcctcagcctcccgagtagctgggattacaggcatgcgccaccacacttggctaatttttttatgtttagtggagacggggtttcagcatgttggccaggctggtcctgaactctggcttcaagtgatcttcctgcctcggcctcccaaagtgctgggattacaggtgtgagccactgcgcccggccccatctgatgtgttcatcaccagattccccaaatccagtccagtacctgacactcagcaggaaatttattagagttgaggaatgaatgactgaatgggctgacatgtcagagtcactctgtccttccctccagggcatgagcttgtagaagacaaagccatgacacagcctcctggagacagaattcactggctcaagcagagcaactttgttgaggagacaaagcttggcatggaatgggcacctggtggcccaagaaggctgagtgaggggtgcagtaggcagcctggatgccgtggcaagctttgggtgttttctaagcacagagggacattcctactagagctgcacaagtctcagcccaagcaggagtgtcccctggctgttagaaagccagagctttgggagagcatggcctctgagtgtcaaggcccatggggatgtgactctaccaggcttcaagcagaaccccaggagaggatggaggcagaaaggctatctgcctgggaaagtgatggcctcttcattccctcaccaaagtcccattttttaaaaaagttaaaaattgatggacaaaatattgaacatgcagacttggcagcagagggataaacacaggtgcactttgtcacagtgacagagtcaatgggcattcatttctaacacggcaagcatcatttgaatgaagacagcagccatcagttaaataaatagttatgctgtcctaagcttgagtgctagctaggctcagagcacggacttggggctcactgactggcatctgtcagcttctgaacttggtcctggtgtggttccctcagagcccagggaggtcgggcagggggtctgttccaggagtgagcagggaattccctctgatccactgacttcagagctggtcatggaagttttgaaatgcaatcccttttttttaagtataaaataatatatgctcatgagagtgcaaaaccaaatgaaccatgactgaaggacataagaataggaagaaaaagcctcctacctccttcatcccaacattgcattttccagaagtttcccatacatacacacacggtatgtccatcttacattccagcaactacagtggatcctcctgtgtgtgctggtttgcactggatcccactctaggtgaaagataagatggacattccttttctctggtggatccactgggacctctctccatgttaccttccacggggtggaggaggtcctgtctgtcttggtccctggtgcagttccgttttggtccaggaaatatttccattgagtggaggggcacagctcagcccctgccaacctgctgtggagttggagcctcctcacttgaggctgggggtgtgggcggccataaactcattgccgtaagcagttctgctacggcagaaccttgtatcttagacacgtgcactagtgcgttgggagggtaaattcctagaaggccattgtgaagtcaagggtgcacgcgcttttaattttgatggatgttgtcagattgctgcacgtctgaggaggcagcagatcattgactcttggtgcagtttcagttcttttttcttggagcttcctgtgttcttcctgtccaatcttctcaagcccagaggcacattgctggtgaagattgaggcctctggagctggcctgaggggctgtgaacccagcttctgtccttgctgactcttcccaggcctctgtgtcctcgtctgaagaatgggtgaatgacagtactgacttcaagggcggatctgaggcctcatgaactcacctcccagccaccagcatccccaggtgcacatagatcaagggaacaagctgtggtcatgggacacgagtttgttggactctggaaggcctggcagtgaggtctggggtggcattgcccttggagttgttgagggacattggggatgaagtatggcccttctgagcaggccacccctgctgaccgtcctctcctcttttgaagtcccagagatgggggatctgtttattacagacaggcaaacagaggcctacagaggtgaagcaacttgcccaaagtcacacagctgcttacattacagaagaaatgccactctgctttttactttaagcacaaaatttgtttctccttgcatgtaataaccttgctgtggctctgattcttcacggtctgggtttgaattctcatctgctgatttctgactgtgggcaaattcctttacctgtctgtgcctgcagatctctgagatgaaagcggagatgggcgagctcactcacaagcagggccgcgctggtgtcagcaccttgggcagcctcagtccttcctcttggatccggcactggcagggcaccagtgcgaagagggctgcctgttcaactcccactgaagctacaggtgagtccaggcctcggtgcaatgcatgctcttgtgatggccccggagccaagcaattttatcatcgtcttgtaactcatccactacatctgacctttggattcacagaataattaatggggcactttgggtggcgcttgaagtgtcaagtttttaattaatgtgccggactgaatatacttagctggaccattctgcccagtccatccaattacccagactcattatgcaactcgattgcgttttccattactcagtggctttgctaaatgggaatctatgctgcagacagacagcccagcgctgatattgattagagagcacagtttattacccagtggaggcaatgcttggggttgtaaatctcttgctggacacagcttttctgcagcctccaggtgggagacggaattgtatttggatgaagcatttcagccatcgaccctccttccaaacttcctctgtgtcctgccctttgtttaatggaattgcctttccctcgccaactcccccctgtaaatacactcagggactcctcgtgctttaatagctaacatggatgcatggtatttttcacctttccccgagctccagaatgacacaaagcattgagcttgccagggagcattatagcaggatcagccacaggggaggatgctgagccttctttgttctcgctggatttaggatggatcttgtgccagacccaccttgtcttgctctgcagtggcctccagcccttggtgagagagggaggcagcagtcagttggcggtcgaaacttgtgtttaaggttgtgattataattccaagtggagaaacactcctctccccactgtatcaagggtactgtttcatactcgataacctccttccactcctattgccccttcagcattgcttcaatgtgttttcctaatctgtggcacaggctgcagcagggaaaagaaagagaaagagtacaggctggcgtgatggttgggccgtgtccctccactgtgtcaaagctgatgaacacctattccatgccgggcaccgcacatttgccatctccagtcctcagaaagcctaggaagcacgtgtttgggtttgtttttttttttaaatcttctagtttagattatttcatattcacaaaagagttgcaaaaatagtatagagaattctcatagacctccacgcccagctttcccttgtgttaacactaaagtaagtgttttaatcagcaatctgtggaaaagaaagctgaggctcagagaggttaaggaacttccactaggtcacacagccatggtgggattggagcccagatctgtgtttagctttgcctgggtcatcctgtaagcatgaatgactatctgccaaaggacttaaaaagaaggagcgggtgcttatccgcaatcacaaaattcaagaacagagctgtaggtgtccgcaaaagggagatgtctgatgcccaagcccagaaatcaagccagaacctcatttatgttcaagatggatgttgctttgcaaaggcacagaggagatttgaattcctaaggggtaagagggaaaacaagaagaatttgagcacaacactgaccagcagaccgcacgcttcctccctcatttagacttgggtagtcttgtttcatggaccccaaactgcctgaaggaccggcttccaacccaccttgccagagccaatcagcaatcagcacgtctaattgggctggtgttgacactcctgttggcaatgtaatagtgcaattagcaacaattaaccttgagaataaatgaaccatcacaaaagaaaagttttgcttttgccaagctcgacagacaccctttcaacaaacaccattctgattctctggacactcctaatgagaaaaggagctgctgggggtttaaacaaatagagtgatagatcacaaataaatcctatttattaagcacacatggatgccaggcttggcggtaagcactcaacattgacttagctccctaaattccctctaaaaacttgtgaaatcagtgctgtttttatgcctttaaaaaaccccaacattttaattttgaaataacgacagatacacaggaaattacaaacatagtagaggggtcccatgtatcctttccccaggttcccccagtggtgacaccttatgtgattgtagattatcaaaagcaagatattagcattggttcaagctacagctctttttccgatttcaccgttttccatgcactatttgtatatgtgtgtgttgttctatgcagtgttgtcagtattattatccccttttcataaatgagggaaccaaatcgtagaaaggggtaagggacttgcctaggtgaccacacagagctgcatgaaggtcaaactccaaagctgcacccctgcctgcctctctaggttttcaaacacccctatcctttgggaatgtgattaatatgggagagacttcacttgtggacgaagttagcccttaaactacacttacagctggtggtaaaaatgttgtcttgctaatttatctcttctaaagatgatatacaaagggcagagtgctctttcatgctcacattcgctctcctgctgcgtgtgtgtgtgtgtgtgtgtgtgtgtgtgtgtgtgtgtgtatctgtatctcacagagtgccttcctgtgtgtggaccctgatggaatgggatgagtggggagtcactgtgacttccagtctggtaatgtgggcagaaaacacgtggctgcctgacctgggacagccggggcaggagagatctactgacaaatggaagcccacctcccaccacgtacagggtggggggcaccagaaggccccaacacaccgaagggaaagctctgtgactctttacatccgatggcttcaaattaataacaaattgcaaaactaaggcacactggggatttggctttgttcttggagctgttaagaatgtaaaaggtcatcgagctacaataaataatgaaatgtgcctgttttgtgcttgggagacgggatttttttaggggggaggggttgctttaatggctctggggagggtcctgaaatcatcccgcttccctctgggtggcagtggtggtggaaatttactgcaagttaaatttttaaaaaatcaatagcatttcagatgattgcgaattaggggctatttgctgaggcttaaggggattaaggttaaagcctgaagatgatcaatgggtaattaccacaaagcagtggggtgagggaatggagcatgtctgtggtcttggggtcagggcctacaggaatgaagaacgcagccccaacaggaccccttttaacatccacagcgtgcagtatgtctgcacatgtcagacctgaatgagccgggctcagatgcattgggaaagccatttgctaggtcgttcacccttgagggtgcccacccttcgccctttctcctcaccaccctcgcggatacccccacccaccacggaggaaatgctctccattcagacttggagcacacaaaggccgaggcgcggacctgctgttcctttcatgccaatcagtcctggggttgtaatgactacaattttctgatttgaagtcaaaaccaaatggcccagaagagtgattcagactccacgtggccctcttcctgagaagaagaagcacaaatggatttttctttcttaagcccaattgtgtgctgctcatcgacccctcatcatttctgagctctattttcttccctcctgcttgaggcacaattaacggaggcccagaaagttttttgcttcctgtgtcttggctttgtgggtatagcttggccttggtgctgagaaaatgccgaggagcccaaagccctggagttgccttgggagagtcgctcacccttctgggcctcaggatggagggtccaggggctacagagctgtcagcctatgccctgagctgggactctgtggaaatgtgggtagcccagtctgcccagggtgactgactcagactctccaggggtcattgactctttgggtcaaacatctgctcttcaccatgtgaattttaaagtgtaaaccagctgggcacagtggctcacacctgtaatcccagcacttcggaaggccaaggcgagtggatcacttgtcaggcgtttgagaccagcccggccaacgtggcaaaaccctgtctctactaaaaatataaaaattagccaggcatggtagcatgtgcctgtaatcccagctactcaggaggctgaggcaggagaaacgcttaaacccgggaggcagaggttgcagtgagctgagattgcaccgctgtactccagcctgggcaacagagcaagactctgtctcaatataaatagataaacaaacaaaaacaaacaaaataaagtgtaaactggctcagaattccccagcagctcccccaactcagagtgaaacccagagttgggactttggccgcaggatcctcctccgtcttcgtccgcatgccaggctagtctttcccagactctgctaagtcaccctggccttctttcagcctgtgctactctcacgggagtggctgccccagggcctttgcctatcctgtttgtgctgcctggatgctctcatccgtccatgctcaaccccatggtcctcttcaattcccaggcctgccatcacctccccgggccgtcatgtgcgaggcagcccctggtctccctcctatagtatcacttacttgagtttctgtgcagcccttatctcagcctgaagttttattctttttgtttgtttacctgcttacgaactgcctgctgcaccaggatgtgctcttccagccctgcatctccacaccgagcccctggcctggcacggagtaggtcacgtgagtgcatgaatgcatgagaggcagtgctgtggagcccgctcagcagtgacactttgtgagtctgggttcagctctctggagctgctcattttacacatgagggagcagaggtcctggcaggctgatcctaaagtgagtgatcctcccatagctattagtggagtcctcaggctgcccttgtccacgctgggggcacctccaggcagctttggatttgaaaagaaggtagctggtgccatgaggcttctgagttcagccaaagggccctctggggcaatgggacaacctggccttgtccagaactgaggccccggaagcgaggggttgaaactggtgccatgagctcagttctttcagctaaagctgtgcatgttcccaagacagaaaaggtcagagacaatgcagttattctggggccatggaactctgcctggtgctttccaggctcttaaacgtgtccatttaatccttcattaagacctgtccatcagctcatctctgtgcatttaaaatatttcacaatcacttcccccctctgacaggggcctgactctggaaactgaattcaacctgcccctaccccgcactcccagtatggggtcctggcccaatagagccagccaaggccttgcggtgtaagtctcggctgctgcctccgtgttgggtgcgtccagtccactgggatatatggctcctattggaggtgagctgtccgggtctctgtaaatctgttcccttctcttcccccaccatcagggacataaggcagagaaaatgccagacatggacatgggacatggacactttgatctatgtactcattttcttgtgctccaaacttttccctttatttgacttcagaggtgaccactgagccagttgcttgcagtccattcagaagccctttccatcagcttccaggcacaagtgtacccttcacctccaagagcgggcagagccctgttagagggtggtcggggcaaagccaaaggcccaggcacaccgcaacccccccgccgccacagccggaactggcacgtcggaggcactgaggcccaggggcctgtgccctgtgctgcaccccgcctacctgccgcaatgctgggagacagcaaacaggaaccacttgaggggccatcagccgctgctgatgcgaatcaaagagcacgcggtccccagcccagggcggaagcacgctggccacccattagttgttatggaaactcattaccccaagaggttgttcagctgaaaatataaacaatttcccgaaaggttttagcaaaattcatgggtgacagccgtaatggcactattaagggagaggaggatgttctctcctgcagctgtgggttgcggcctgccttgtgtcaggggcacctgctctcccatgtctttccactgccacccacccagtggcatgaggccagacacgcggcaggtcctcctcaagcctcgtgagtcctcctgtcgggggctactccacgtcactcagacactgtcctacactggggagagagaaatcccaaggcaatgtgcctcttctgggctccctgagcaaatccctcttacaaagctgggtgcagaaaaatatcacctacaatgatggcgagttatgacaattagaatagctatgtactatcagcaatgattattattacatggtattatttcattattgtgatcaattatattacttgtaattattaataaaaacatcaagtatcattatgttccaggccacttgtgttttaagtgctgtaattctggtcacaggcatataaggcaggtagtattaccatctcattttagaaatggcaaactgttgttactgaaagagaccctgtgccaagcaggaattttaagtttcctgaaagttctgttcctctcttcattctctccctctcaccctctctcactttcatccagcattcattccacaaattcttattgattctaccatgtgctacatactgttctagacacagagtggcagtacacatgcctgtgcttccactactgtgtttttacttggcttcttctactcacctgtcagaacctagacgtcatttctcccagctagcctttttgggacttgctagttggggttaggggctttttgatgcttctacagattctgaacttccttcatctccatactgggagttctatgacagttgcttacttgtatctgtctcttcctctagactgggaaccctttgcctcctgggactgttttttgtctatgttttcagggctcagcacaaaataggtactgaatttttgttggattttatcactaggaaaatagttccaagaaggccaggtctgtcttttctacccttatatccactagaagtgtctagtctatagtgcttgcaaaatatatatttgtatgatggataaatggatagatggatggatagatggatgaatggttgattggatgggtggttaagtggatgaatggattaatgtctggataaataaaatgttggttactagaaggttgggtgattgaatggttggatagatattcggatgttggacagatggactgatggatggatggatggatggatggacatatgggtggatggtcagatatatggttggatggataaatggaaagttgttaggatagaggtttggatgactgggtagataattgaatattgaattgataaatgagtagcagatggttgttgtctgaggtcagtttccctgggcaacagattctgagctggtgttttacgtgcagaaaaattgctgagatgtgccttcaggatcaacacctatggaagagtgaacaaagaatgatcaggcagcaagaggagtcaaactgagacagagttgcaacctctgccgatcccatggggagctctggagctgggatagccattcaagttgtcttgtcttgaggcaaggagtctgtctttatagctctcattatcagtcattgggtgcacactgtccctgggggaaaggcctgattagggatgaagcatctttttcagccaagggcaatgcctggagagggactcagttgagagctctcacattttaacacttgcagcagctgggagactgagggcttctgtccaacaggcccaaaaggcaggccccaggtcatgcaccagagcatccactacgcttcacccttctgattcacttacttggctcctccaggattcaaccatatgcctaacaccaggcattcaacaaccatatgcctaacaccagaactccttttctgaagagtccttagtataatgtgatatatgcgggatcctgtactgtcagatcaaatactgtgttagcattcagagtgtagggctcgctgaggcacagtaaaggcaaacccatatcctgaatatgttaaccccaatcaagagaaattgctgcccttttgaaggtggaaagtgtcctgtggaatcaacttgccaccaagtagctggttggtggtgttctcaagggcatattagaagctaaagggcatattagaagctctgtgtgtgtctccccagatgattgagccactatactgatatgggtagatttttgtaggatggatatttggtggtagcagtagctagatcaaccttggtaagtggggagttcatgctgttgggctcatgtgtagcttctacctgtgctaccatagctattccattaatgaactcatggtgccatcaacagtagctgatgacaaatgctagctgatgtcagctggcctactcattgtgtctacttggctgtctagtggcttccaagatagatgctctagtggcttccaagatagatgctctctatcctgaacatatagtacaacaatcttagcactgtatgacaactttcacgggtccttccagaagcctctttttcagacctccttgtcccaaatgtttaagtctttgttctcaagacctctgactgacaagtcaagctatttacctcagcccctgagtccatgtatattcttacattgaactactgtttttttcaaacaaaaatggatggccaggtgcactgcccaaagctgtgcagttttgctgtacctttgggaatattttctttcactgctgtctttcagggtcacttctgagtggtgatatggtgcacctggtatctgtttttggttttcactcacatgcgattaacccactcatgaaccaaactcaggattttttctcatttttcagctcatcataaaggaaccacccccgtcttcagctggcaatgctttgagcaaagggagaggggctggtgccaccatggtagatgacaagggagtctagacttcctcctgctcctggggcttacatgtgccccctgctcctgcttgtgcttgatcctcgaagtaccacttccatcttgaatacattgttcctggatcttcctgactttatgacttgatggatctaagagaacccaacttactgtgggtagttctgcctgagggtcacttgatgatccatagtcaggctccacatctccaccagggctgaggaggtcaccaggagctcttcttaaaatggtcaacaattctctattgcagttggccttgctccagcacccaagtgggcctacactgtgactctcttactaggatttgccatgccatcttttcctgttgctgacacctctagtataataagttcagctgggtcatatgatctgagcagcagggccacttatgctgcagccttgacctgctgcacagcttttttctgctttgatccccactggaatgggcagccttgtgtaccactcactaaattagttggagtagttttccaaagtatggaacatgcatcttcaggtcccacagaggtcttccagtgttatcctttcatctttgtggtaaaaagtatgagatgcaataatttgttttttatttggagaggatgtgctgttatgcccccagatgactggaccactctactggaccactgtactgacatggctggacctttgtagaggtcaggctctcccatcctttggaacacatgtgccttcccaagagttccaacttgccgtttcttgctcatccagtccaattagcatgatatgtcagatatcacggaaccaatgtgatgttcagtggaatatccctataatccaggttccttcagaaggacagagaacaggagaattaatatagtgctcaggcaagactgtaaatgtaccctgttgtccatgccaagtgaatgacaaactatttttgatcttccttcttgatggggatgaatgcattcaacaaattaatgactacatctccctctgatcctcttgcttaatataatatgtactgtttcaatttggcaatgcccagcagtaaaatttgaaactgggttcccaggtgaaataagacttcttgagcctaagctatagtgtcccttgaaactcttccagagctctgcattgggaggtattagacgcttgcccaggtaataataaagtttgcctcatcctcattttaatggtattctttgtatgtgtaggtccccttcaggagccttgctgggaaggggtagtggggccaagctgggatatggatagaccatggctattatgccatcaaaaccgcattcaaattaatgaaaattttgcacaaatctaatagtcaccctacttctcatcaacttgctactgagagcctttcatgtacttagagatacaaggcaagggactggccatttagctggggagtataaacagtgcatgacacaggctttccaaggaggcagggcaaagtagaccggagagtcctgaagcttccctggagggagagtgacttaggcgaggagagagcctggccacccctgacaaggagtcaggaacggtaatgccttatttaaagaatcatgcctaatctataataagtaatataataactgacaacaataataaatgtgacatttattgacaagtacacaaaacccattggtgtctattataaatttcaccctcaaaacaacccttcattcattcagtaatacaacaattatttttcagacactgagggtacgatggtaagcaaaatgatacgatttctgccttcatatggctccccattcaagggagcatgtggggacagagaataaagtcagccaataaataaacatgataatttcagatagcagctagtgctatgaagagaatagaacaagagaataaacaagatgatgcggctgaggggtacttgcctggatggggggtgcttcagatgggaggttaacgaagcctccccaagggagtgacagttgtgttgggactagagcaacatacagttcgtgcagaagcatgttgctggaggaggaacaaatgcaagggccttgaggcaagcatgctctgggatgtttgaggaggccaggggaggcccctgtggctacagcacagcctataagaaaggtggctgggaacactgatgctcagatcatgtctggggatagacaatccgactcccaattcaggatgagtcttcgacactcaagaaggagaaaggaaggccgggccacactgaatacatgtccaagagtcaattagtccctgtgtttaaagatcataacctctcttgctcccacattcacaccaggaggaagcggtgacacatgctgtcccttgtcctggaggagaccctgcaccaccagtcctgtgtctgcgactcccagaaccggatggcccaggcgctgtgtccacgtagcccttcgtgtattgtattgggcctcttcagtcactgctagattttccagtattgaccaacagaatcttcccattggctcgtttcttggaagaatgagaaagagatgggaagagggggagagagcctagctccccacatgcaggtctctttccttcctctctccctgacctcttccatgcgtgcttccgatatccccatgttgagaagacaaaccacagataaagtagcctctcctggcccacagccaggggcgtgggtgcctccgtcctgtgtgtgcagacagctgaacaaccagattgtgaccttggcctggacttcctcagctggctggagatgaacttgttttcagaactgtgaaacttgacatcctttatcccgataccttcaactcccaagtttgcttggccaaaacaagccatatctgcttaatctttggggctctttctcatggaaaaggaggctgctgctttggccatttccaaaggcccagtgtccacagagcctttcagcaccacagtcacccctttggaccccaggggggagtatcctgctgtcatttcagtcacatttttagacaatgaaactagatggtgaggaagggccactctgtgctggcgctcaggcgaattcaggaggggagcagcctgcgtcactgccccagggactgctggttagcccaggactggagacccattacattcccaattagaggctctgccactgagcaggtgccttcagcttcaacccagagaggagccctgctctgccctggaggggcctaagaagcttacattatttacagtcacagttcaccttttattgttgatgttggtgcttccatttggtgtcagaaatttgcacgttaaggactttctaaagtgggggttttctttgggcatggggttgtggggagctactgcctcgtgcccccaatttcactgggtcccactttccttacagccttctctcatcctcttcttccatgcattttaatttaagtttgtatttagggtcagcattttgaaagaagagttagcatcatttttaatttttagcatcacgaatctaatttacttgttccatgagttaatagtgttggctgcttgaagagcacatgccttctctgtgaattcggcagctccatctggggtgatggcgagggatgagaccactttgctgggccagccagggccggcctgggctgggctgtggctcattcaggctttggtttaagattgaagttggggctagagctgaagacgccaccaaggtctgaggtagagccacacttggcctctattacatggcagggttattcccattcacagggtggcacccttctgctctgtcggctttcccaagcacatggatttttaaaaatatcaagaaaggaaaataataacaacctatggtactgacaaagtaggaggagggtgttgaattagaggcaaagaaggagacccagaacttcagaaacccaagcacctgctagaaacttcatggcgtcaggacaaacagaatgattccagagccatctgtctctaccctccccccatcctcctacttgacactttaggagccttacttgagtgataaggatattttaccacagcatttttacttgggcaacatactttattgtttagttccagggagaaaaatggtcgatagattgatgaaggcaaaatgaccttgttgttgagcaaaaccctccagatctcatcaccttcagtagcactgccttcacctaaatgctagtgaccttattgtaattgatttacacaggctctccccagtgtgtttgcattgcatgtggcatttgacatttcacaacttggcctctcaaaactgggatccaggatcagcatgcacacttccaaagcagacagtaaacattcgttagagcttgctcttgagctgacatggtgagatcatacacagcatccttagttgatggagtaaaaatgctaatcaggaagagtgtatgccccaggagactcataaaacaggttgccaatagggtatgaatcaatcagtcaatcaatccatattattaagcattctgtggccccattccatccttctccccaaatcagttcagctctgggaactcaaattcaggagcagatttcaaaaacgttgagaatcaaccaggtgttatgagatgagctcacatcaaatggtaaacagttcaaggaattgtactatggaaggaggcagacagagcttggacagagacatgagtagagatttctggagaaaagcagatggaggatttgcatagttggagggaagtgggccggcgggcaatgacgatggaggcgacatgctgagtggttgcctggctcaaccactcttcactgtttgagcttcacgggttctactcagccactctggagcctcaccattctccctgcatgatggagctagtgaccccatctctcagggctacagcgaggttctaacaggcaaaagaggtgagacttctttgtgaatttttcaggaaagaggaggagatgcctcctcctcctccttgggggttgggggcaggagtggggctcactcctgtaatcccagtacttagggaaccagaggtgggaggatcacttgagtccaggagttcaagaccagcttgggcaacccccaagctggcaagaccccattttcaggaagaaaaaaaaagtgttgtggggtaggagttgtggtggggtagggggcagaacaagcaaactttcagtgatgggaatgggcagcaaggtcaagaccaactccaacaaactccacagaggtgtttgtgttctggctctggagggctcagcccctgctagggcacagccagcacatccagcttcttgagcaattaagccatttcatcaatcacctgagagctgttccttacaccagactaccaggcaggctccagggtaccttttgcccccataaacaaaattccatcactgataacacagactctcctctgcctcgatatattgctccaacaggaattccaaggctgagaaatggcatgtataactttctccttattaggcaataaaacatccagaagtgtgaatgtatacagaacaattccatgcatgtcaaccacatcttcagaatagctctaaactattctcagcttcctttttcctgcaaatggtttaaaggatgcactttttaagtccatacacttgaaagatagaaggaccctgccagtggggtctttgcatgcagagggaatacaattgaaatttcagagacattgataaagaagctgggtaaaaatctggccttgggaaatgtgaagttctttccccacttttttgtttgtttgaggtatatttacattcaatagaatactcaaattataagtttacggttttataaattctatgtatatactcatgtaatcaccatcccaatcaagatgtgtggtgttttatcactccagaaagttcccttgtcccctcctcctccaggtgatatcacaccacctcaaccctggctactcagaggcaaacaatattctgatttctttactacaggttaattttgcctgttctagaacttcatatgggtgggatgatgcagatgtactcgttcatgcctgggtctgtcactccacctaaggctctaagaatcatctgtgttgtattagcaagtggttatgtcttcctttctcccacccacctgccctttttctctccccttcccttcccttctcttcttccattcttcccttcccttcttttcccttccatccttctttccttctttccttctctctctttcttcccttctttcttttgttctttctttctttcctttctctctttcttttctttctgcagaatctcagtctgctgcccaggctggagtgcagtagcacaatcatggctcactgcagcctcaacctcctggattcaagtgatcctcctgcctcatcctcctgaatagctgggaccacaacagctgtgcagcaccatgcccagctaattaaaaaaaattttttttagagatggggtctcactatgttgcccaggctggtctcaaactcctgggctcaagcaatctttctacctcagcctcccaaagtgatgggattacaggtgtgacccattgtgcttggcctgttattttttttctcgctagcattttattgtatgaacatccctgaatctgtttaccatcctgctattgaggaatatgtgggttgttcgcagtttgaggctgctatgaattaaaccatcaggaatttgtgcatatgttctgatttctcttggataaactcctaggagtggaattgctgggctgcacaatgattactgtatagattttattaaaaacagaaagctccaacgtggttgtgccatttcccatgactctcagcagcttctgagagttcctgttgctccagatccttgccaaggcttggtttcaatggtctttttaattcttgtcattcttatgtgaatgtaatggtgtggcattgtggtttaatttatgaaacaaaggatagtattgtattatgattaagcttggttgctttcacctgggatactctatggacaaagtcaaaaaacagctggtggctccatgagttgggatgagtggggagctgctagcaggggtctcagtacacacagcagaggtcaccttagaaagagaagtgccgccagggagggcagggccatgtgccactcagaatagccctcgtgggaagtcctagcccctcaaagccctcagtttctggattaagcagtccggttagggatcaagcaaggacaaggggaggtagcaggtcctctgttctccaggttgactcctttgtctccattgaaccacgtgtcaggattgcaaaggccttgcctcacagggcccacagccaagccccacagctgactcccaagggcctggagtctccattcaggtgtgtgttgcagggatctgctcaggcaagtcggctgggccaggccacttgctgctggctaagatggccaccacctggcaagaagagcctcagccgggcatggggaaaggttatagtgattgatgcaagatcgatttatttccccactgcccagtgcaaggtcaatcctgatagacagccctgagccacaggggggccacccctcgacctcaatatctcactccttaaaaatcccaaagcgcagggaaaggtcagcttgctggtcttggcctcgttcacagcagctccctggcacgctgccagagctctgcaaatcatgtcgtgggttccttttgccccctgcctgtttcttactctctcaggctcccatgagggacatttcaagccaactcactcataatacattttagaatgatgaggagggtgacaatagtgatggcgatgatgatgaccatttctcgattgcttgcacaatgctagactgactccatcatttaagtatcacagccaccaagtttgaaatcagatctccaaactacagtggagaagtggagctagtagctgagaaacttgcctaagatcacattgaacattgtctgcaaaggagatcaggggagcattctgtgaatgtcctcagtgatggacggcctggacgcgagatgaaacgggcagaacagtgaagacataacaaacaatcctggagtgtggtcgagaagtcaccaggagagctctaagtccagcaaagaggagcaggaagcgtctgtggagcagctgagaccatgtgcttcctggaacagatgaggccttgcaatcctcagatctgcttctgacctttaaaagtaaaaccatgtcagacacctcagctgtctgagtgtactcacatgtaggcaaagaaaatcacccccggctgcttccacaagggcagctggcaaagcaaccaccattccctgtgtgctgtccaagacccaagcctcctgcacactgaactctcggcagcttcgtgagaccaggattctccctatttgacagatgaagaaaccgagacttggtcaccagtaggcatgaagtggtagagttggccctcaagccaggcctgtctgattttgaaggccatgatcaacttggcatgctatattatgccatgtcaatgtgtgaataaatgtgttacgtgagatgtgcaagcatatgctaacagcttcaaaaaatagcaaaagagagacaccaaaatccatttctatcctttcctggttctcccgtcccccttctcagagacaatagataataatcttttgaacatcattctagggatattccattcatacacatattctatgcataattttgcataatgaccctcttactctttatgcaaataagtacatataatgtgcatttttttttctgtaccttgcttttctcaattaacagggtgtttgacaaacagttcagcatgagtgcagatggacttgactcattctcagtgatgtcctgtagctttgtatgggtgaaccccaatttacagagccattacccttttactctgcatctatagtgttcttctcatatctttgggcaagtgtgagaatgtttgtgggatgaattccttgacaaggagttgccaagtcaaagggcacacccctttttagtctagagggatgctgctgacagctctgcatgagttgctctttctactcccatcagcaatgttcaagggcatcgagtttctcatgcagagcaatcacagggtgttgtctgactctgtaacggagccaatctgatagacacctcatctgcatcgctcttattataagtgaggctgggaaactcttcatagactttcaaagccaactgtaatttccttccttgtgatgtggctgttcccatccttcatcagacactcttggtgtcctctatcctactctgtaaagctccttgcaagagggcgatgggtagcgggctgggggtggaggccattgagggctgcaggagtcttggactctaagaccagcaatgcatttacctctccattaatcttgttcaagacatttgatcacttcggagtgtggtttccttctgaaaggggtttagatcagaataatgctaaaaatctatggatctctagttattgcacagacagttgtggctggcagtttattatctactcagaaggaaatggatctgagcttcagaagaaagaatttaatttagatactgtggacaacttcctgatgtctcaggatattaaactctggaatgaatgatgataatctggggtagaatatctttgtaatacaaagaactttgaaaacaagatgactcatttgtcctaactggaaaagtttccttctggccctgaaggaaacccctggctgggggtttgaagccagtgtgtacacaggggtctttgagggccttagtgtgtggtgggcttcatgttcttgtagttgggtgccaagtttattggcagtgtttggcccaattacctgtttgatcctggagttcatgagttatctaatttcatgattcaagtcattacacatgttaggagcagacacattgtcagttttaacttaattcctaaaattagcattattgaaaaagtgaactgcaaggggaactcctgattttaatcaatagttcaagtgagcatggttaaagaatgtcaaaattcagcaaaagcatccagagcctccacaacaatgacctctgtcagacatttgaggccacaaagtgtttgggataagtgagttgtccagtgaggggaagcagaaactgctctgagcactgaaacttctttccttttgatggacatcattgccggatacttcgcatagtttcttgccttagtgaacagaacatactcagcatcgttttgccttttcttaataactcaaggtcctattaataacatccaatagtaattcaggcaactgaccctgacctctctggttttgcagagctctcgaatactagcatttgggggaaattaaaattgtccaatttggcctccttaacgtaggggagcactttttagtaacccaaaaaagagcctaaagaacttacattgacaggtctttagtgtctgggagaccctggacactggagccagctgtacagtgggagtcttcgttagctaaccaccacctcctcaacaactgcccttttgccttctaatctttaccaagtgcccaccaagcacctaccatgcccaggcactgttctccctgctgaggagtcagtgatatgccaggaagcagatgtggttcctgccctcaggaagcttgaaatctattgtggtgacaggtatccaacagaggccaccacaactacacctacaagcataggttgttacatgcatgaccaaggaactatgtggggtcccagaaaaaagaagagcaggtgatggtggcagggaacctgatctttgttctggtttcatagatgttttaccaggacatagtttcccatgattagggggtaaattgcagttctgctcttcctgatcatgtgaacatggatgatttaaaagtcccacccagagcctcccaccggcggaagctccgtgctgggaaagagcagcagaagtgggtctctgagtgctttgcatggagtaacaggttcttgagcacactggaagctcccagaacatcactgcattgtggggagaacccaggactgtccagtgggaacatagagcctccaacacccacttcatcctcagagctctgcagggacaggggagggatcagggccaagatcccccaggcacaacctcatcccctttccaggacctttattttgtgctacaattataggaagggaaagactaaaggaagaatctggtcattaaacagaggggtgatttcaggcccttggagcaagaacggtgcaaagaatctctttagacttggagggaagattggttccctgcaatccagagatagaggtatgtgggtcaactgtcccagagtcctgttcttatgtgtcccgagagaacctgcaaaaggagatgcggctcagggctaacatgtggtacaggaccctcagggagcgggggaggaaacaggccagagtgaccgcaaacagctagcaggctataggaacctgagaagggagcaacgccaacaaggtacgatgggaatatggaatatggggagagattagagaaagtcctggagaagacaattcccaggtccagatcggcttccaaggccttcttggtgtctatcttacaattacagaagaagccccatttatgaagtgcctactgcatgttggcaccgtgctaagggtttccaatacagccacaacctgggtcaggtctacacaccactggtgggagatttctgatggattgtgggcaggtattttttgttttcatagctatgggtttacggaccttggtaggtattagaaaatgttttattgctcatgcagtctgggatttcacggtcattattgactaggagtgggttaaattctataaagtaagtccacctagagttgatttagagaaaacagtcttgcaagtggtagtctgggtaggatgaagaaggggctgaaatcataaaggagcatgccagtggctgtgtttgggagacattgagcctgcgtgaggttgaatagcatccttcggagtgcacggctgtgaagaggctgtgggttcccatcccaggtctggctgggtccagagctggagctgagggtgcctgggcttttcttcctgctcaaggtgttggccctgggtactcagtgaggagacaaagccagcccacccctgtgcctcagcccctctggacctcaccttcacccttctctgctccctggacaccacagtgcagctgagacaaggcagcctcaggggcacacaccctgtgtcaccgggtgggtggacagagcccaagaagagcctggaagcacagctcattctttgagtggaaagggtagcaggcaggttgaagggcagttcagagcatgagctttggcggcaggactgggattcagtttcaggtctggctgctcctaacccggtggtctctggccagtcctgccacattcccgagctccaggccccccttttataaaatagggcaagttatgtgctccctgggctgccttggaggtcaaatggagtcaaggggttgccctgtgccccagcctcagagcagtgtctgcagggccccagaaaaataatcccttccccaccaatcgctggctgatggcccctgcccgccttttccttggatgaggacctggaaactggaaagggccaggtttttgtcagccctttggttttgggcagtgcctggcaccagaaagacattcttgggacaggcgacaggccaaggctctgaggagtgaccctcactgtggggtgagccctagggatgggtgcccaggaaggggcagagccgaggaaggaaggcaaggcagcagggccaagggagaaagctgctgcgccccaggcaggacagaggccagccgctgggagagcagggcttcccacccctgcccaggcaggaaagggacctctgctccctggcatctcctctgtcctgtgcaggaagctgggagggccagggcccggcaggcagtcatcaccgcctcattcctgcttcaccccgagtctgacaggtgaggaccccatcactttccccgggaagatgagcccgctaataaccaagttcaataagagaatcaattaacatgcctagtagcagagctgcttaccctgcctcttcctggcaggtgcctgctagggtcagatgcagcccataattacagcgtcaggtttgcagcctttttcatggtaatttgtatatgtatatatatgtctgtgtatatataaatatataaagtgtggttaaaatggatgctgagcagaggtccggggtactggcaaagacggacgcgtttaatttcctgcatgcttgctctggcttgaaagcctgcagctgtgtggctgctgtttcggagcgaaaaacacactgttctaggaaaccaccttctccgtgatttatcaaccagcgttgtgggagccaaattagttgttgattgttctatcgagtaactcaacttcggcattgaaggatctggcgcagggaggttggaggtttgacgaccagcggctttctcagaagtagtcctttctggaagcagagcccatgcacaggggaaccggccgatgggctagaaacccgggctgcagaaaccattagcttatgtttctagagagagccttgcggctgtctctcaaatgtctgcagctccggtggccccccagggtgccttactgggctgcgggcctgggctgtgcttgtgtctgcctgtgggcatctgtctacacagctctgccaggcatctggaactctctctggcatcctccctctgcaacccaggccaatttgagaatctggcctcacccctgtcgatgtttctcctgcccctgtgcccctaccacaggtggggcggatgggaaggcacaagggggttttccaaggctggaaacggggccatgataattcaggaggtggctccactccagatgtctctggccatcttgctgtttggtgcgcctatcccgctctcaggccacactcgccctgcctagtctccaggcctcttcctcaggctgtgcccactattcaaggtattccccctccaggcctgaaacccccactgctcaggacccagctcccagcccacctcctctgggaagccctctttgagggggttctaggctgggactgttatgacctcccactggcacgttggcttggctcctggtacctcctgtgtccccatgtggtgagagacaggtggcagcctccccacatgtgtgtgtgcatctcctgaggtgctgagcgcatgggaggaggggaagcaagctcaccgacgctgggaaacctgtcctccaggccgcctggttagagtttgcggggcaggtgcagccccaaggcccgtgtctctcaagtgaggtctcccagctcccaaagtcgttttctcctgaggaaccatgctaaaaatgctggttccagggccctgacagaaccatgctctcaggagccagcactcagggtgcctgggctttttcttagaagaggtctgggatctatttctgaaataagctctctcagagaaatctgacaggtgcagaatttcagagctacaagctgagacaatggcaggggcctccagtagccgcctgtctctggggcccctggcccacatgaggcccctcaggcccgcacacggtctccctccagctcacatggctccacacacagtccctctggctcacacacagtccctctgacccacacacggtcccactggcccacacacctctcttggctgctgaggttttgtgcttccaccaagccaggggactgttctgtggccctggaaccaccgtgaaagcaaacaaccctcggctgtgttgggagacagctccagctcctccatcctcaaatgtgagagctgatgattggggtggaggaggaggtgagtggggagggggtgggggagaaggaggtgatggggaagagatgagtgggcaggaggtgagcagggaggaggtgagcagggatgagtggaggaaggaggtgatagggaggaggtgagtgggcaggaggtgagcagggagaagatgagcaggggggtggtgagcggggaggaggtggaggggaaggaagtgatgggggaggaggtggggggaaggaggtgatggggaggaggtgaatgggcaggaggtgactggggaggaggtgagcagggaggaggtgagcagggaggaggtgagtggagtggggatgggagtggagtggcgggaaggaagtgatagggaggagatgagtgggcaggaggtgagcagagaggagatgagtagagcagggatgagtaggggaaggaggtgataggaggtgagtgggcaggaggtgagcagggaggaggcgagcagggaggaggtagaggggaaggaagtgatggggaggaggtgaggggggaaagaggtggcgggggaaggaggtgatggggaggaggtgagtggggaggaaggtggggggaaggaggtgatagggaggatgtgggggaggtgggggggaaggaggtgaggcagaggaggggagtggggagggagatgagtaaggaagtgatggggagagggtgagtggggaagtggtgagaggggaggaggtgagggggcaagggaggcgatgcggaggaaggaggtgatgggaaggaggtgagtgtgtaggaggtaagcagggaggaagtgggggggaaggaggtgatggggaggaggtgagtgtgtaggaggtaagcagggaggaagtgggggggaaggaggtgatggggaggaggtgagtgtgtaggaggtaagcagggaggaagtgggggggaaggaggtgatggggaggaggtgagtgtgtaggaggtaagcagggaggaagtgggggggaaggaggtgatgggaaggaggtgagtgtgtaggaggtaagcagggaggaagtgggggggaaggaggtgatggggaggaggtgagtgtgtaggaggtaagcagggaggaagtgggggggaaggaggtgatggggaggaggtgagtgtgtaggaggtaagcagggaggaagtgggggggaaggaggtgatggggaggaggtgagtgtgtaggaggtaagcagggaggaagtgggggggaaggaggtgatggggaggaggtgagtgtgtaggaggtaagcagggaggaagtgggggggaaggaggtgatggggaggaggtgagaggggaggagctgagtggggaaggaggtaatgaggacaaggtgaggggaaaggaggtaagggaggggaaggggagggaaggagctgagcggggcagagcatgtctcctctctttaagcatcctctgtattctgcagaggccaagcagtctggatgttggccttcctcagtggcccatgaaataactttgctccccagattctgagcatgggttagaacaccaagcccctgagcagccccatctctgggctagggcagggagggcagggtcccctttcagcctcacacctgggatgcactcgtaggaacccgccaggtgttctgctcaacttaaggtctcaaacaccagcccagggcattgccaccttcccacagtcatggtgatgacgagcttggagtcctgcagatgtcaaggagggacagggctgcacccctcaccctagcatcactcctaggtctgcaggccacagagggtggtgctggattcggtggagaaatgtgcatttgcactggctgtgctctttaccgtgcacctctgggcaagtcctcctagggccaatgggaggaatcgcagaggcttagacatgcagctgtcttcaccgcattccttcctgctccctctgctgtgacaggctgcttcctgcctgggagctttgagttcagaaagctgtgagctgttttcaattcaaggggcaggttctctctctctctaagggtccctgtagacataggagggagggctgggggtgagttcagtagggaggcttcagacaaaacccaaagagatgagctagtttccttcctagttagcctaggtggccagcgccctgtggccactcgagcacgtgtctctcctcgtctgctccagcatggggctgagactcctgttccaggattggggctgtcgctggtctcgcgttccttcttcttgaaactcagacaacccaccccaacctgacctttggacgtgcagggcatctgctcagaacaggttgtcctcttagcctattgttcaaccttgcctggttgtcccaaaccttgagccaatctctgtagcctcaaagaatcttagacttgggagggagggtggcccggaggacctcatgtcctgcatttggggacacagacacaatcacggcctaattagacacaacttggctccccttccataaagcttgttccgtttcacttccacctgtgctattttcatgtttgtttctaaataaattcacctcttaaaaacattaaatagatttctttacgcagggtcagaagtgggaaatcattactccttgccgtatttaatagacggtaactgaaaaacagaaaccaagtgttactagctggagacccttgcctgaagaggattccgagcctgagtccagctttgttcacaaggaaggttgtgagtgttcagggcctgtggatatattagacagagatttttcctgtcatcgtaatgccacgctttagcaaattctgaccaagtgcagcccttcaaactccaggggggaaactgagacaccaggtagagaaaggagagacaccaggtcaaaggggagtctgatagctgggctcagacaccagctggagctcttctccacacctttccatttcactcaccccctccctctgtgcctcagtttccctcctctccattagtccaggctcaatagccatacaggtggcagtggtggggatcaggtgtcagagaggagcagcaagctctgtctcagctccatggtggtcattgggggccctccagtcctctccctttggctgatgatggctgtctccacgtgtcagccacagcaaccctgtccccagacactagctgctgttggaagagaaacatgcaaattccatccattctcctcaaacacaaaagggaatgtttaaactggagccagtcaggggtcgggggtggagggagtggcctccatgaggaatgcatgataaatcctctcgcctggcttcttggctacatgaacagttttattttttctcccaacccctcccaattgtcctcatgttgggcactgttttgtgtgccagaaggacagggagaaggacagatgatggccccaccgtccatcacaattctggcaacgcagaaggcctagagaggaggctcgggggggctggggtgcagggctccagggtttgtggggaaagctgtttgggagtcaccacaacatccatcatcagctgtcatgtgcatgctgttccacctctctgtttattttctgagcatctccaagagcctgggacaccaggacagggcatggcgggaggagatgtttgtgtttctccaaagagagcttaccgtcttgtgaggtagcaagagaaaatgctgaggaggtgctgatcatcaggtgggagctccctgttttggttcaagaggggccataacaaagggtacagttaactgcagctgtgtagtgacaggataaggaagtttccttctttccttacaaagacagactaggcaacaacgcgagaccccgtctctacaagaaaataaaataaaataaattagccgggtgtggtggtgcatgcctgttgtcacatctgaggctgaggcagaaggatggctggaacccaggagttcggggctgcagtgagctataatggcaccactgcactccagcctgggtgacagagtgagaccctgtctctaaaaaacaaaacgaagaaagaaatgcccaaatgtctcaccccctgcacatttttagagtgcttctcagtttttcactgccaacttggtgtccctaatgggtcttggcagtagggatggaaagaaggggtgtgggaagtcagtaagagaagataaattgccccaaagttattaattccattagttcatagggccatacccctttcctttctctcctgagcggcacttcagctcggaaggtacaggtaatcccttaagtgcttcatcaaagagaataaagaacatggagcaatcactccttggctgagatattaaaagaataaattcaggttgggtgcaccaccttggttgtcaaagagaggccatatatcacacctaaaggacattcaccagtgtcaaaaagaacgagctgtctttctccccaagggaaaattgcctgtggtggagggagattcattcaactgggtttttgcaagtcaggtcaagaagaggagggtgcgaccaggttgatcacatctgaaatatgattggcagacagctaagtgacctcggtgagaagggaagtaaattaccttttggtttcaggttttctgaaaagctgtgagccaggccctttggcacaaagtacatgctagggggtcacctccatcatggggagcatcatctggggctgctggggtggtcaggaccctcacagggatgcccctacctgctcagagagctgctggctggcccagaatgggcgctggatgctgcagatgcagttgtcaacacagatgtccgtcatcaacgcctgcctgccctggaagcgaggttggcaggagcagcttagggtctgacctaggccttccctgggaaacctaccttcatcccagctctggtctgcattttccacaacaaccagagaccctttccaaacacagctgggaggccaggcatggtggctcatgcctataatcccagcactttgggaggccaaagtgggtggatcctttgagcccaagtgttcgagagcagcctggacaacatggcaaaaccccatctctataaaaaaataaataaataaaattagctgggcatggaggtgtgtgcctgtagtcccagctactaggaaggctgaagcaggaagatcatttgagcctgggaggcggaggttgtagtgagccaagattgtgccattgcattccagcctgggtgacagagtgagatctgcctcaaaaataaaaataaaaacacgactgggccatatcacgcctttgcttgaaatctctcccatggcccgtgacttttcttagggataaaattcaagtgaactgtgaatgagttataaccccaatactataccattgccccaggagtctcccacaagacagaagacagctctaggagtttcctgggggctgctgtaccaagtgactacaaactgagtggcttataacaagagaaatgtgttctctcaccattccagaggccagaaatccaaaatcaaggcgtcaacagggccaagcgccttctgaagcctccaggagaggctccttcctggcctcttccagcttctggtggctctgggtgtccttggctggtggccgcatcctcccatctctgcctccatcctctgcctccgtcctcacgtggccttctcctcttctctgtgtgtcaggcctcactctgcctctctcctgcaaggatggctgtcattggatttagggtctggcaggataatccagggtgatctcatcacaagattcttcacttaatcacatccacaaggacattttccccataaggtcacaataacagattctagggattatgatgtggacacatcttttgggggttaccattcaacccataatagtagctggttgtttaaagctggggtccccaggaagcagaccctagacaaggctttgagggcaagcagccgctctgggaggcaatcccaggtaacagccctaagaccccgagaaagcggtagagaggaaagagtgaagtaatgctctcagcgcatcacagcagcgagtgacccaggctggttctcaccagggggctctgggagatggtgccgggcaggctgtggggcaaggaaactggggtctcattcaactcccaccatccttggctcagggctgcttctgggcatgagaactccatggtgcctccagttatgggagatcccagaggagagtcgctggtgttcacagaaggacattgttggaatgttctggaactgagtgccaagggcatatgggcacgtacagcagcatccctgaccccagtcctggcgaactcccctttctttcttcctccgggctccaatgtcacaggatgctgcagaagcccgtgtgggcaggacccagcccagatcctcagggcttccctgggaccccacacgattcctctccattcataagctccccctcccagcctctgcctcctccagcctcctggatggatctaggtggtctccgattggtgtgctcgggacaccatattagtggagggagggaggtttagatcctgctggggacagggagagacagaggccgatggtggtcagaggggccatttgctgttgcctcctccccctgaaggtgccagggctagaggtagctggaacatcacctgggcttcaggtagtggtgtggcctcagccttccaaccccaaaccagatatgccttttcccctgagctgacagtgggaaagttggctcggacccagaggatggagtcccgtctgtgtgaacacagcaagcagagatacctgcggccctggaggcagcttggtccaggaagcagaagcctgggctacacatggtatgaacagtgatctgcatttcattaactctgcccccaggctattggctgccaccaagtttgctgtcctggtgaggagcaggcaaggggtacagagatgggaagcagggccccgtctggcatttttaccaggggtgacgctgcttcttcactgagccaaagtagaaactgggcagcagaaggaaacggttctccctaaataaccttgggcagctcctgagctgggtacgtggctctccgatgccacatctgttcttcctgcttccagcaaagactccagccctgctttccatctgcgaccttcagaatgggcttgactccccacctggaaccacagtgggtgcaggacccaggctgggtaaatcagagtcagccatgggtcagagatggacacatggcccaatcaggccactgagtgtcaagccctgggctcctggcagaatctgtgcagaagaatctctctctttcctctggccgctaacataggcgacacaagcctggagctcttgtggcccctgtggcctcctgagcagagctgggctgggaatgaggcctcagagagggcactggagccgggaggtggagagacaggggtctgatgatattcagcagccagatccagatgtgaagcccagcctctcctccgggactttccggttacatgagccaacagatttgcctgcttcgagttgagtttctgtcacttgcaacctaatgagtcctgactatggcagttacttaacctctctgagcctcagtttctgagtctataaaatgggaataaaagtggtactttatatggttgttcttacatacgatgctctgaggatgtagtttgtgagaaggcagtgggaatgcagtaagtttaatcaaggtttgttgagtgagggaaattcaggaaacttctgtcagtcactttagccaatttgaagctctcccttttttgtgcaaagacaaactacagcttactcaactggtactaatttatctaggttcagcatttgattttattgggccttggattttcatctattttgtgtctatctcattgctccaaactagtacaagctcctgaattgccagggccacttcttattcctcctgggatgatcaggttgggcgggccagggtgctgctttaaaagtcagattttgcttctttagtcttccctattgttaatgaacagtttttggatgtcactttgtgcctagcttgttctaagtgtttatgttagttaagggttttctgtgtctatagaaggaaaaattcaaactgagttaagcccaaactagactttgttggctcacatagctgaaaggccccggggtagctgccttcaggcctggctggacctagtagttccagtgtcatcacaggactctaagaactgtcatggctctgcttttttatgtgctggtgccaagactatctgttcctggtggatcccagcagccccagactcatgggaaaaaatgaccatgtctttcccttggtcactctaacaaaagtctcagaagtagccctgattggacaatctgggtcacatgcccatctgtcaatcaatcactgtggtcaggattatgctgactgactgagggctgagttgcaagccccaccccctgccctgctcaactacaaggaccaagaaggggaatgaattcctctgggaacatcagcatgcagctactagaagaaaggctaatggatgccgagccacctctgtggcccttgtcactcaaatactaacaagttgcagaagtaggtaccattacatgttgcatatgaggacagatgaggcacagggagggtaagggacctgcccagtggcacacagttgatcaattgataagaagactccaacccaactacaaggttctttgtaatgacctcaaaaagaatttttgctgttgtttctctgctttcctctgtttgtgattccctcacaccagcacagtgcaagacacacagtaggcctgaaaacactgctcatttgagtccatggatgcctctttctggtgtttgtgtgattgtttactcctcagggtttccaatgactacagagtacggccaacagcaaaacacaccaatttttactgcaaattagtttttgaataaatgatatataagtttatgcatcctaattaaccaaaaattatttattacagcaattaaaataaagttgtgtaaatgactgcaattttaagttcttgacaaagcaataaagtccattactatttcttgccctgccgaggctcctggaaatcctgccagctgctcagctgtcccgccccccgtgaagattgcaaggagcagagtcagagaatttattgagctgggtcccctggggaactgacttcaggctggaggccctcaggcaacaatcagcatcttctgacttagtaatgccagggagggtattagaaaccactagactcctcagccacccagacacaaagatacaaggtggggtgatgtgcatgtctctcttcaggacagcccagaacagccaagtccgttctgcctctaactctccttccccttttgctttgtcctgtgacttgctgggaccaacctgaaatgccccctcttcccaaaccaacatttatccatccatccatctagtcatccatccgtctagtcatccatccgtcatccttcatccatccattcatcctttcttccatccatccatccatccatccttccatccatccatcgttccacccacccaatcattcatccatttatcacccatccatccatccatctgtcatccatctaatcatctatccttcatctactcatctgtccacccatctctccaatcatccattcacctaattgtccatacatccttccacccattcattcagtcatccatttatccatccaataattaatctaattatcacaattcatccatccatccatccatccatccatccatgttaccatcaatgtaccataccccaggtgcatgtttcccatttaagtgtccttgggggcatagtgactactgcaaaactccaaagagagctgtcagccatgggctcagccagggatcctggggagtgccaggaaaattcccctgggaaacaccaattgttgtcccatccctagccctacaagtattctgggggaggctgagaatgagtagattccttttctctatgtggagaggaagaatgcaggcaggagaatggcatagaagaaatgaaaggcattttaaagaattttggggccataatccaaggaagtaaaactggtgtggagcctgcttctcatcattttccagtggaggggagcacgaagcatggttggatttcgcagatattggatgggacatacttgtattaaaaagtatgttgtttatttgaaattcaaatttatttctcttcttttattctttctttagcatgatctgacaaccataagcttgcagacccacctgggttctgcctcttgtgaacaggtaaccttcggtgagtcactctgacacttggtgagcctctctgacactcacctttctcacctataaaatggggataacaataaatacctcggggagtgtaaccaaaattgcccaccactgggaccacataggtggtggattgtgtagaacagaaacatgaagggctcaccaggaattccaggtctgtagactgcaggacagaggcctcagccagaagtgctcagaatccaagttcgacaatgctccgccagtcacaggaaacatctgtggggcaactgtggtccctaggctgctattttgtaagctcccatttttctagggctgtccaaaggatgacataggataacatggtgatatatgaaccccaaaggttcggcgcaccgagccggcattgcacaaatggcagctccagggctctcggggcagagatcaactctattgttttcagccccttctcttgctcccaatgctcccccctgctctctctcttttcaggacctcccctctcccctacctcatctgttgcagcaactcctgcatctacagatgtccactgactgcttccaaaccctacagctcttcacatatgggagaaaaagacttggcagtttcttaagggatactcacaaaagaccatgttgagacttgggttttggaatgagacaaacttgaacatggacttgaccactaactctttcagcaactcattctgtgccagtgggcagctcattcagcaccttcgcatgcagtgcctgtgaaataagtactgaaatgaggtgaaataaatactgaaatgaaataagtgtgaaataaggtctggagctccgagagctgtggccagtgctccataaatgccaacagtgaccagcaggaccagcagtactacatgattctcagagccacaagggccctcagagcggacttcctctagcacagtactcattggaggagagctggcttgatttgcagctttctctagctcttagcttctgggaaacaagaggtcagaacagggtgactgcttgctcaccctgtgtgtaagaaattttacaagaatgggaactccattgcagacttgttgcttgtttcaaaacattcatccatctacggtttttcaggatgctgactttaatccactataaatgtgtcagtcaaaatccttttagttgcaggtgataaaattaccagctctgagtaactaaaagatgggggttgactaattgtgtacaacaagcagcctggagaaggggagtaacccggggctcctgtgttttgcatgtttctgccttgccatcttcacagtcacaagaaggttgccatagctccaggcatcatgtgcttacaccatagtatcctacacaagaaagaaggaggtacaagccaaagatctttctctttataaatctctctttattcttggggataagctcttccagaagcttcctagcagattttcttctgcagttcagtgttgggaagtaggtcacacacccatccctacaccaaaaacaaagaaaaataagatggcagtggcttagaccgatttgcactttctgtgattgctgcacaaaatcagtgttctagtcacaggaacaatggaggaatgactactgagtggacggtcagtatttctgccatttgtaataataatgcagataaaagtagcttccatttgcggaggacttactatgagcaagtcatccggttaaaggcttgactgaatgacattagtttctcacgatagccccattttgatcatacaagaacccactgttcttgttcccattttcaagggaggcaagtgcattctgtggggcacctggtgctggctgtccctgaagctgtccctggtgctggctgtccctgaagttatccctgatgcgtgtcccatcagtcagccgagggtggaacaaaaactatgaagccaccaatgaccccacgctccccctccacttcccagattccatgcatccttgctcaggtctggcaggagaagccaagaatagaccctgccttgctggtgcccagcagcagctgcaggaggaggcatgggtctgccctctaactcaattgcatgtttcgaccatgttgcaacattccaggccaaaggcagtgatttctaatcaacaggattgtgtccttggtccaggcctttctggagcacttaaagtgactggtgacaactgtttctgtgggtcctctttcagtcttcattcatgtgggacattttgactggggaatggttttatgccttgggcctcaaaaacgttccaggcgttttggtcacaggaaagtgaccgccagaaaagaggtggggacaactgagactcatgtgagtctgatggaaacttggggggaacaacgtgttagtacttggacctatttctgagcaatggagaggaagcacgcaaacacacttgtaaggcacctacaccatgccgggtctgtgcaaggcagggagctgagcagtggccactcacctgcttgggcctcccttctaaagctgcagcctgtccacttctctctgttggcggaaggcagaaaaacctctctctctccatttctttctgtctctccatctctgtctttcagtctctgccttgctgtttctgcctttctctgtctctgttctctgtgtctctttgtctctgtctctgtctttctgtttttctctgtgtctctgtctctgtgtctatttcggtctttgtgtctgtctcttttttccatctctctttgtcatctgtccttctctctgtctctgtttctgtctttgtctctgtttctctgtctgtgtccatctctgcctctctatctcttttttatctctctttatctttctgcctctatctctttctctatttctctctctgtgtttttcttttatctctgtttttctgtctgtgtctgtctttctccctgtctctgtctctgtgtttcttctgtgtctctctgtctccgcctccttatttctgtctctgtctctttccatctctctcaatctctgtgtttcttttttatctctgtctctctttcacagcatgcacacacacacacacacacacacacaggtgggtctttaggcagaaatgattctttttatttaaccaagaatgaattgggctgaaacacacacatttttgccattttcagtttatcaaaaagtatatgtacatatgtgtgtgtgagtgtgtatgcatatgtgagtgcctctctagataaagtgcttctccccctccctaccttctgcctctgggtagaacacactgatttctaaatagcaccaggagacccacacactctgacctgcctggtctgcagggccagacttgcaggtagctgtgtctgtacagacacagctgtatgtgtgtgtgaggcccaatcctctctctctagcagaatgaggagatgtatcttttttttcaggatggaaaactactgctctctgagccgtgctctcctgtgtgggtagaaagatgcctctctatcaggaccagctctaggccgcgcggcctctgttttatttgctaaggatctgccttctgaaatgcaaaatcatctttgtttatttgggttggtttgttcctccctgcaatgagaaaaaaatatatagtctttatgcacacagaaaaacatatctcctctctgtctcacactctctttgatacacacacacaccacacatgcgcgtgcgcgcacgcgcgcgcacacacacacacacattttcccttctttcactatgtgccactgggaaaacaaacccttcattcctcgttattccacacacgtagaataatgtgtgtgtctccaggcagaaagtcagaaagtcttttctctcaatccctttccttttggccccccattcttacacatggtgcacacacacacgcacacacacacacacgcactcacaggctccatcactggaaaaactgtctcccttctttcactaaagatgcaccacccaaaaagccagcacttgatctagatgcagatctgattgagccaaacttgtgtgcacacactctctcacgcacatggatgcacacacacactctcacacactttcctgcatgctgagaaatgaatccctgaagaagggaagtgtgtgtgtgtgtgtgtgtgtgtgtggtgtgtgtgtgtttgtcaaaaattattctgtctcagagagtgggtctctgaagtctttattactggatggaaatactggctcctttgagaaagtttgtactagggagaaaaacatacgcataaattctgtctgttgaagaggaaaattgtgtgtgtgagtgtgtagaaggtaaatgtcctttctgtgttggtttgtttctctctgcaatgagaaaaaatgtttttatccatgaagagaaagtgtccccttttccccccacaccccctccacatgcacgcacatgtgtacacacacacacattttcccttctctcactgaatatgtgccactggtgaaacagactctatttctcagtatgcagaataaagtatgtgtgtgtctccaggcagaaaatcagaaagtcttttaatctcttcctttctctttctctctctctctctctctcagaaaagtctctctctgaaggtttctgacacttggcaaataggcacctcccccaccaccggacagaaaaactcagtcatgctgtgacagcaggaagattttgtgtgtgtgtgtgtgtgtgtgtgtgtgtccacgtgcatgcaggaagatgtctgtgtcttgttctgtctgtgtctctgaaagcagacatgcagcaagtctctctctctcatccttacacacacacacacatttcacaggctctatccctagggaaaaatccctcacatctcccttttctcagtaaagatgcaccacccagaaagacagcactcgatcggatctgcgtttggactggcagaaagctgcctagcaggagtctctgggggtctctctcactagctcctcatcaccagcagcagcgacgccatccccagctaagcaatccccttggagaaagcccctgaccacagcccccgcctttccacctcggagactcgtgtgtgtctgggtatgggcagcagagagtcgctgtctgtgagttgtttgctcttcccgagggcaggaaaatctgtatcaggcagaaaaatctgttttgaaaacacgcatgcacattcatgcacacaacacacatacgtaccacacacataccacatgcatgcacacacaggcaaaatgtctttccttccttcaggaaaggtgcacccctggaaagcccaggcactctttctcagtttccagaaacctgccggcattgcttgtcttcagagacaacgtgtctgtcaatgaggaaagtctctctcggaggcccttatctctaggagagaaaaacacacaatgagagaaactcactctccctcttcccacactcagaaatccgtgtgtgtgtatgcactgcgcaggaaaaacaagcaaaacaaaccaaaaccaaacctctgtgctctggcccgtgatctctccgtacacaggagaacgtgtgtgccattttccaggcagaaaaaacgattttggacacgtgcaagctcactcggatacgcacacactcatgcagaaaggcctcagtttgcaccagaaaaacaagctctatttcctcttggtacctggccctcagaacagtctgtgtgcacctccagatagaaaatgttttttccctttcactcagaaaaggctccatcctaagctacctgtaatgaggcagaaacgacctccaccattagtaaaaggcgcaactgagtaactcacacgcacatgttactctttccacactgagagaatcctgcatgtgtgcctgcttgtgcaaaaaaccaaaacgtgtctggtttgaggctttctgtgagctcaaagagacctatctttttccagatagaaaaaaaaccctgtctttccaacacacacacacacacacacgcacacacacacacacacacgaatacacggcacttgggacagaaatgtcccccttgccggccccagggtgcaccgcctccagcacacgatgctcattccctgcagttcttggctcatgagcaattgccaatttgtgtctgtcttcaggcacaagacattctctcacccagaaagggcccccaagaaaacacaattcagataacacacacatacacacacacacacacacacacacctttctccaattctcactaaggcttcaccacctagaacatgatttctcagttcttggaatattttgtgtctgtttacgggcagaaaatgatctgtctcactcaaatgtctgtccctgaagctgccctctactctctcccgcaccagagaaaagcccactcacactcgcccgcccttttcacactgagcaaagtctgtgtgtgtgcacctgcacacactctcatgtacgtggccaaaaaaatgtccgttggttcatctctttctgcaaacaaatgtgtctttttctaggtagaaaaatcacacacacacacacacacacacacacacacacacacacacacacacgtgtttccccttctctcaataactttgcaccacctgaaaggtcattatccaattcttggctcttgagaaatcctttatctccagttagaaaatactgttgctccctgagaaatgtctaaagtgctctgtcactaggctgaacaacctgccgtgccctcccctgcacacacacacactcacaccagtcagcaggcgcgcacacactcacaaccagaagagcactgtgtgcacgtcagtacacatcctgtcagcctttccatgtctgcgcacacacacacacacgcgcgtgcgtaggcagaaaccttccccctgcccatcaagtgtcaccacttaaaaatcacttctttttcttctaattctcagcttatgaaaatctgtgtgtgtgtgtctccagacagaaaatgattttttttcctcctaaattgcttcctccagagcactttctcactgggagaaatgattcccctccccaagaaaaacactttagagaagacgatcactcccactctgacttccttttcatattggaaaattgtgtgtgtgtgtgtgagaaaaactgttcccttttggtctgttttttttttttgcaagccaaaaaaccacgtatcttttttttccaggcagaaaaactactgtctgtttttctgtctatctctctcttatatacacagatgtacacacatgtgcacacacacacacacacacgcagaatgtctttgttttctaagtatttaccatctgaaataaccagcactttccaatccccagccctcagaaaaatatgtttccaggtagaaaatattctctgtctctcagaaaagtctctctctaaaggtttgtcactgggcagaaatctctctttctctctcacatacacacacacaacaagaaggaaaatgtgtgtttgtggttgtggttgtgtgtttgtttttgtgtgtgtgtgtttgtgggtacaagccgatgaaagtctctccatgttgagctgcctccctgcaagcaaaaaaatacatgttcttttttttccagaaagaaaaaatacgccaacacacacacacacacacacacacacacacacacacacacacagacatgtggctcttctctatgtactacctgaaaaacaagcaaacaaacactatttctgggcttgcagaaaattatgtgcttgcttgtttccaggcaaataacaatattcttaatcttcactcagaaaagtcacttttcaaaactcactgggcagaaatacattcttccctaaaaaataacaacctactctcaccgtctttccacacttagaaaagtgtgtgtgtgtgtttgtgtgcacgtgtgtagtgggaaaaaaaccctcactttgttagtctatctcttcctgcaggcagaaaaatatacgcatctttttctctgcgggaaaacatgtacgtgaggtgcactggcacacacacacacacacacacacacacacaatctcaggcagaatgtctgttttctcactaagtatgcaccacctgaaataccaacacttttgaaattctcggctcacagaaatacatgtgtctccaggcagaaaatgttctttttccctctcagaaaagtctctctctaaagcttttcatcaccgggcaacataactcccctctccccaagaaagcacacacaaaatatgaaaaacacacgttggaaaagaagaaaactctgtgtgcattcataggtgtgtggttataagcaaaaatgtctctctgtgtggatttgtctccctgtaagcagaaaaatacgtatgtgatttttccaagtgggaacaaaattcttctctttctctcactgtctttccctctcactgtctcccctctctctctctcacacacacagtacagacacacacgcgcgcgcacacacacacacacacacacacacacacgtctcttcaccgggctcccctgctaagcaaatatgtctcccattctctagggaagtgtgtgtgcaccacttgaaaaacactattttgtagcttgcagaaaattatgtatacgtgtatgttacaggcagaaaatgccctccctctttttttctttctcttcttctttctctctttccctcttggaaacgtttcccctgccacagccaagaaacacacaccacattaggaaaacataagtacctgctcactccccaggtagcacatgttacgggtgtgtgcacacggccctgcctgttgctctgtctctccccgcacacaggaaaacacgtgcttgtgtgtgctttctccaagaagaaaaatcaatctttctctctctctgcctctgtctctctctccctctggtggaaaaatcatagtttattgctttttcccaccagcagaaatatctcctaccttaaccccttacaggggctggggacctgcacgcactcgccctgcaaatctgaaaacccggcgctctccctcctgctctttagaaaaaggggcatgggtcactgtcacccattttcttatcacgagaagagagtgcctgtgttattctctctttagctaggagagctctctgtctttgtcacacgcaccccctttccatgtctgaaaagggtgtttgtgtcactgtctgggcccaatgtcactgtccatttactctgcaccctgggcaggcagtgcctttcactaggaaagaaggaagtttctcccactgctccgtccccagggtcctctcagggaccttccccctgtccccgcacctagtccaggtgggaaccggtctccccttgcagggaggcgctctgtcttctcccgggcctggatacacaggtgtcgcagcaggagttcaatgtaccccgtgacgccctcgcggccagacgcccctgcccagaaagaggggaccctccacttcactgaacccagcccgtgccaggcccccgaggacaccgggccacagtctcctaggatgctcccaggcctggagcggggcagggtatctcggtgccaggcaagttggtccccaacgagccaccccagcgggggtccctcctccagtcccctgaatcccttgtctctgggaccacgtctcatctaggctcaatcaggggcgatgacaacaaccatgactttgccccaggaacctgagtggggggcacggggcccgaggaagaaggggccagcgggctgttccccacgctgcacccccactctggcgcagcgaagtctgcagatctctgggccccggcgctgccgaagcctcccccacgcgccgcgctcactcgctgcacaacagcgccaccacgaggccgcgggcggaactgccggcagcacagcggtcgcaccccccgggccccccgccggctgtgcggatcccgaatccctgcttggctcggagctgccaggtctaagccgaccctcagagacgcacgcccctgacccactgggcagctgtggtgtctttgtatacaatgttcccttcctttctcctcttctcgtagatgttcagattccaagggacttttccagaagcttccagaaaactttccttttaggggcccaagagaccttgatttcagggacacagtgaaccccacttaggaccccaagaaaagggacttgtctccaatctcctgtcctagaatgtgcagacttagggggctctcctgtactcctgggtcccgcacatctgtccagccccgcctcgttcaccagaggcagcagagacaggctgagcacacagacgtgggctcaactctctgcccatccactcactgtctggggaacttgaacaactcacgttgcctttctgtgcctcagtttccccatctggaactggtctaaaagaacaccccccggtagagcttctgggaagatcacatgaagtatgaagctttgagagcttttgtacccgacaggctctcaggaggcagcagtccaaacggtggagggatcattatgactaagcaggcacagctcccagccgagggggagctggatctccctggcatcgaccaccccaggatggttatgggataaatacctctgcagacgttcaagtggagaggctcaggaggatgccgggaatgtctgctgttgctgggtggggaattcaaatgatttgtgttcactgtatcccagctaagaagttctgggccggggcaatctttctgatgccctcttgtctcctgttaacaaggattagctcagcagtatagacaggaccataaaatataccaccttagccagatcctggggaggccactaatggagccacactgggccaggtccacgggggcctctcagtcacagctgggagatgaggcaaagccaccgtcgtcctcacctgcccatccaccatcccggtgaggtcagtgctcaaaacctgtctttatcccagtccggtctcacagggagtatttgtgctgctttaaagcccttcccggtgtcctacttacttctccctctcaacccgccggctgagataggctaaagagaacatcgtttcttcaacagatgtttattgaggacctgttatatttcgggagccgtgctggccgctagggacacagcctgaacaagataggtccctcttctctcagggaactgacattctggtggagagaggacaaaaaccatgtattaataagtaaacaagacaatttcagaagacaaaggctgtgaatgaagcaaaataggatagacagtaattggagagggctcctttacacaaggggcggggggcggggataagaagaaggagctggctgagtgcagaacagcaggaagggtattctaggcagagtgaatagcaggttgaggcccggggtcaggggagaatgagctctgcccgtttgaggaatggcaggaagggccctggggcaggtgcgcagtggtcagggaagcggccagagctggcttgtgctggatgcaaagagaaggtaagggattggagtacttaataaatatttgtcaagtgagtgaatgcataatttgatctatccatgtacagttgaccaggtggcgaaggtttgccgagtcagcttctgtccattttctctacttagtggtgtcagctctcaaagacttcttgcttcagagcccctctccgtgctcctgtgagggtggggatgaaccctgaaaagccgtctccttgtgggcattgctgttgtgttctcagcattcttgcacgttgacttaaagctattcaaactccttatgagcatctgagggagaggagctggatccacactctggactcttgactccaactttgaaataaaatatttaaacagcccatctcatgatattcaaaacaatagtctgaaaagtattctgcaatagtcattgaaacaaaatgcctaattcccaaattaccagtctacagagttcccaaggaagaagcgtggatgtgaaacagctgcagactccgttgtttcctggatggcccgaaacagttgttctcactcagtttcacttgagaatcactttcaaggaggagactttttcaatttgccataaatcttaccatgtttatttttagaagtttcagctccgtgataatttgcaaatgagaaatgtttagaacccatgttgaactgaacttccccaagaggagactggattacattagatgaaatggaaatagaagtcaaattttggggaacactgacgtccttgccatgaaaccatccattgtggatgtgccctcattgtggaacctcacctgcaatgtttatgtgctggaaatagaattatatcagccattcacactttagtctaaacatgaggcacttgttcctgctctccatcatgaatccatgtgaatcctaaaaaataagatatcttttgtcccaatttcacagtggaccaatggaggagcagtggatgtgtagccaccgaagtctcaagatggctttggaggttctgggtgatgatgggggctccagggtttctaagaatctttgagaagtccacacttgggagctggaaagccatccagagcaaggcaagtgttgatcctcacaaacaagaatttcccaaagttgcgaaagaagccctgctgaggaagcaggagtactaagcttgagtcttggctcccgctctccctgtgtgacaacagccaagctctaggcccatagaggaaagagtctgaatccccaatccaaacctttcacttctcagctaggaaacgggggcttactgaaagagggcactgccaggttgccagtgcaaaagttgtcctttctgagcctcagtgtaaacccacagggggtgtcttcctcacagtcacgtgagcaggccaagccttccttctgactcccaagtcatctgtggacagagacagctggagaaacggtttcctagagcactagcaagcctctagctggacatacctccattgagtttcatcagaaacgggtaaacctgggtgcagagttgcataaacttaggcaggtgcatccagatcccagagccttattcctggatgtaaggtttcttgcgaggtgtggcttctctgcttgctgcaatccaaggagtgaaaatgtattttgtatcttctcctcaagaagagaagaaaataacgaaagaaggaaaaacaataaaagaagggtaaaaagaggagaggcaaattgagctacgttgggtttatctcagtcataaaatgagggatgacttccgtaaagttcatattctttctgcctcttgtccaactgtttaagcaattattgagtgtctcctatgttctgggggctatgctgcagcctgaggttacaaagagtggcaggacctggctgtgtcttcagtaaacccctactttctacactcaagttagggagataatgtcaaggagtttagcttttgcttacttgtttcttttctttttttctttttcccttttccatttccctaggcctgtttctgtaccttgctctttccttcctagctctgctctctccatccctctttgaccaccacgtacagtaatacttttattcactgagtgtattacgttgagttttatctcacatgtcctttactttagaaatgaatgactctgattcatggaacctctctccacacacaggattcatttgctttttttggcgtgtgggactctggatggaaaaaatttcttgtccttgaattcaggagcacttctatcatgcctcctataataagattgaaagttctattggccacatttttggaggactgattttagtcataaacatataggttcagcaagacacccagaaaagtaggatgtttttttcagggctcctaggctagtgctcgggtgagaacacaagttgtttagattcgggggcattatggtgctcaaagttgactttaaatgaatgatagagtgacagtagcttgctgaaaggtttggtgattggaaaaggtctttctagcttcacctttctcaagcagtgtgaaatatgcatggcaagtcttattttctatttaggcaaatccatccctttgctgtcgataagaacgaaaccaaaaaaggtcacaatttttcactgtcaacaagaaacaaagagcaaatgaattagggctgcagcctggaaaacaggagccagggtgggaaaaacaagaaaacgagagctggccctcatgtattgcttcctggtccccatgggcctattgaggaccccctgccctgcccccagaggtgaggccttctcatttttcatatctttgtgaccttcaagcattgtttctttgaaaggaaggggggcaaaggaagcagggataaaatagaagatggaggccccccacgagaagaggaaaaccagaattgcactcacccaaggaaccacaatctgtatttcttgagcagatttccttgaaacacgtttattttatttatgtattcgtttgtttatttttttgaggcagagtcttgctgtgtcacccaggctggagtgcaggggtgcgatctcggctcactgcaacctccgcctcccggattcaagtgaatctcctgtctcagcctcctgggtagctgggattacagacatgcgccaccacacctggctaattttgtatttttagtagagatggggtttcaccatgtcggtcaggctgttcttgaactcctgacctcaagtcatccacctgcctcagcctcccaaagtgctgggattacaggcgtgagccactgcgcctggccttgacacacatttataacaaactggagtattttccatgctccatgacgtgcttaataggcatctttaaaaatggcgatgcaggaagttcactcacacaacaaacaaccctatattttgcagctgaattctcctctgcgcttcatcaggcataactcactgtgggggagcacattcagatggcaagaagagatttcccagaccctgttgactgctaggtacctgctaggtacatgcggtctaagtcctcattagcatgggaagtttgggagcaacaggcagaactttctctgatcgtgcacaccgtgaggaggaccaagcagacataggaggaaacaagaagtggatgcatggtctcctcaccttggaagcaacaagcaactcagccacatgataaaccaggaaggaaaatgtctgactgataataggtgacagaatgaatcaagggaggaaggtccctttgggtcggggtccccaatccccgggccattgacctatactggtccctgatgtgttaggaaccaggctgcacagcaggaggtgagtggcagcggagcgggtattactgcctgagctctgcctcctgtcggatccgcagtagcattagattctcataggagaacgaaccctattgtaaactgcataggcgagggatctaggctgcacactccttatgagaatctaatgcctgatgatctgtcactgtctcccatcatccccagatgggaccatctagttgcaggaaaactagctcagggctcccactgattctacatcatggtgagttggagaattatttcattatatattacaatgtaataataatagaaataaagtgctcaataaatataatgcacttgaatcatccagaaagcatccccctccacagtctggggaaaaagtgtctttcatgaaaccagtccctggtgccaaaaaggttgaggactgctgctttgggttataaaccccaaatggcacctgtatgaaacgatagggaggtttatattattagtaatattaatttttatttcataaacagttgtcatcgagatatagccattattaatttttttaaaaaaaacttgacatctattttcaagttcttttaatgaggttactgcagaaaaaatgaggaatagacagagatggggtaaggggcagacagaggagagagagagagagagacactttggaaagtagatttaagctaggtgatgggttggtaggtgcagcaaaccaccatgtcacacgtttacctatgtaacaaacctgcatgtcctgcacttatatcctggaacctaaaataaaataaaatttaaaaaaagaaagtagttttaaaaggcagctgtttgagaggcaatgagagtctctgttgagagtgagaaaaaattgccaagaaattcatgttggctcagcaagtaaactacccctgaagaagctgattaatgtttaatttccacccaccccagtgttcgggctctggggactgaaggaggccacccgagataagcatgcagggccccctcatgagagacacaccatctccagctgtcactctattaccccatttcatggattcactttgaaattacgatgggaagttgatgcctcgaagtgtctgccttttggacaccaacttcctcttgtgtctggagccatcaggtacacattcactgttgcccggatcaagggcctctccttgggccctggccccagggccagagctgcaccagcgctctcagctcccccaagccccctacgcccaccttccaccgcatgggaacacagccagcattgccagatcttttgacttttccagagaagctgcagatgacaaattgtagctccatctggggcttcataattcaactcctaagttgcattgccaaagggtggcaaatgccacggccctcttctggaagggcccacgtctttgcccacagacagtatttaccaaacatgccgacgtagcctcctaagcagatgtgagggccgtctggcccagccaggtgtcttctcccaccctctcctcccttgccggcctcctccttcccgtccttgtcgccaggctgtagctggcctcgggccccatctccagttgccatttcagaccctttccgttgagggatttctgggcccgttgaggtatttctaggccccgttgcctccaacatttcttcttccaaggccatgtagagaatggcttggtgtttctaattaggggagcattttgttcctgggtttttgttattgcagaaggaatttccattgcacttagaatggcagagactttgcacagtgtcattgtgtgccctcgggcggaagccgggccttgttaaggagacgccagtgtttctgcagtgccatcaccaggcccagaacaagggcgtcctcagcttcccagaagaggccagtaagtgtcaggaaagaacgtccctccccctgaatgtgaactagccggagagagaacagggccggtggcgcacagcccctggcagatcatccgaaacctgacgtctgctgagggggaacaactttgccctgggcacctgggaaaaatgagagcatagcctgccacctggcactgtgaccgtcagacacggtggacaccgagcaaaaataagggtcccgggaacagctggggctgtgcaactccaccaccatctggaagtagcgagccatgggccctgcggagtgggaggagcagcagggagctttcgagtctcgtccatcttctgagcgaggcctcctttgcacttcaattctgagaacattttctaaaagcacctcccgtgcgaggtactgttgtgagggttttgcgtgtattcacctatggaatccccgtgaacacctttccaggtagggcaggggtgtctgacgatgtctagagacatctttggttgtcacagctggagggagttgctggcctctggggacagaggttgaggatccctgaggcagatattggtatcattagccccattttacagatggaaagactgacagagagagattcagggccccacttaggggcacccgggactctctgtgcaggaacctctgcttctccgtggcccactgtgtgccccactgacctgggtgcatccctgccagcccccacactcatctctccacctgggcagagaccatcctgttgaatgctcgagagatcccttgtaagaaggctgcatgcacagcacacggtgttgggacctcttggttccccgaattaaatgatttgggagaactttccaaagcagcagtcagagaaaaccccaccctaccgattcggtgtcgggggagcacgggccaaactcaatagaggctttttgtctaaacctcacactcttggatcataaaaagaacatctgcattttcatatattttaacgtttaataatccaagaagtgtgaataataaacacttggatagggccgatttcttcccttctcccaccagacaggactcggtcagaagcttccagatgctggagctctcatgaccgtgccagggacctctttcaagaaggaggaatggcaccgaggagcccagcagggcgtctagctgcttcgcagagtaaggcacagatggcaaaatttcatgccaggttaccaagggtgctgtaggtttcataattgcaagagtctgttttttttcccttgatcctgctatgttgggcagtgaccaccatctgttaaataccttgcaaaaagccttctcaacagctgggccattctgtacatttcatctctgcctggaaggaggagggagaaacagcctcatcagtaaacaccagcaagccaccagctgctaccaccgtgtcctgcaagagtccgaccccaaattcctctccctggagcccctccttcctgaagcccctttcagagggatagaatgttttctttaccagttagcactcaggagtaaagtgcctgggaacacaaatgaaagggttactctctttgcagcattttgctgacttgctaaggtgcatgaagatagaccccactcatttttaaacaaaagggagaaatggactcctctcatacaggcaagatctggggccacaatcctgttttcagcacttggcttacaccctaaactgtgataaacagttcttttgtcctcaaaattcagatgagattgaatctcttcctgcaacgcagttcacctgcagcctgggaaagtgttctagtgccatcttgagctgctttgtggaagggacccgaatgatccagaaactgctggaccttgtttgcaaggctgtcacccaaggcatcaagctgctgtctgtctccaggtttccagacccttggcatctactcccctttgaattctcaggtgaccttattgaccccacatcaagtgggaatgcgctgagacctttggaggtggccgtttgagagaagccagccacgctcacctccctcctcccaccctccctgaggccctggaggcacgactcactctagcaaaggaggtagcccctgatgggagcaggcagaattaactcaggggtcagccctggccctgccctctttgagctcttcaaacatcatttaacagcaattaggtaattggggaaggtagatttcctgagaattagtccaggattggggttaagaggccttgtatgtggaatagaagggaaatggccaggcagagacttcttgtgaacaaaagctgtcccttctactctgttttccttccagctaatcagccacccacactccatctccaagtcactgcctgggagctttcagcatcttgtatgggcctcacattgtccaggcccaggtgccccactcagcagggctccagtttcagcagccccaggcagagttctgtctaatttatgcaattccgtttaacacggcagaacccagggcgagtggggcctctgcagcctgtccttggccagctcccacacctgcagtgcctcagtgcgcccagggtaccccgagtcccttatagaggctggcacatcctcattgcatgccactctctgcccttgccccacacatgggaaaccagggtgttttccggatgctgctgtaagataatgccaagagactcctctcaaagctttcctcgaaggagcagggtgatctgtgtcttgggtaaaagtaagcatattctgtggtgctctgattagggtaggattaaagtttttattttgtttattttacatggcatttattaaacattgctttataatgaagaataatactcatatggcactggttcacaaccaagggaggtggtttgccctccagaaaacacgtggcaacatcgggagacatttttggttgtcacaattgggtgggaagttgggtgctcctggcatctagtggatataggcccaggacgctgctaaacaccgtccaatgcatgggacagccccctacaacagagtcacctggcctgtagggccagtagcgctgaagtcaagatctgacctgacatgcagcaaattgtgagaatcttaagtgtgtatgtcagtgtgtttttacatatagatactctgggttagtttcctaatgctgctgttaaaaattacaaacttagtggcttgaagcaacacaaatgtatttgttgttagttctggcgtcagaagtcttaaaatcaaggtgtcagcaggagtgcatgcctgcagaggctttagggatgaatctgtttccctgccttttccaggatccaggggccacctgcattccttggctcatggtcccatcctccatcttccaagccagcagtgtagcatccttaaatgctcctctctctctgatcctcctgtgtccatcttataaggctccttgtgatgacattgggcccacccggataatccaggaggatctccccatatcaagatccttaacctaatcacatctgaaaagtccctgttgtcatgtaaggtgacatgcctacaggttcagggtttagatttaagacatggacatctttggggctgttattcagccctccacatagactccaatcaaagtgaacagtacgtctgtgatccagaggctcctgtgtgcctcctttccaccagaacctccccagcaccattctgacctgtatcaccatagaacactttgcctgttcttagggtgaatgatttttaaaaacaaatctctctttattaaagcctacatttgaaacattaatacaattatgaagagatcccaccattggatcgctagaaagctacagagaaattcttaagctgaacattcaaacccaggttagaaacaaccagaacttaattagagtgagacgtggttattttacagcgagacagattcacattaatcatgggatgggagggccggggaaggaggaatgagagatgagatgtacattccagtaattaaatatgttctcagaggagcaaaccgtggcggaattgcaaagatgcttaacgtagctttctaagccactggcgccagtgtacaaattgtcctctgggtgaggagcacggagattcggctactccatgggtctagaatgttaggtttgatgatggccaattgcacttcatccaacaaatactgcagtgggacttattgccaatccccaaggttcagggagtagggggtcagggccggaatgtgaaagtgaccagacctaggcattatcggagctcactatctgtggagagaggtggtcacctaaatggtgtgtgatacgtcatgcttggtgccagagcttcgggctgggagggcaggggcatctgtgagggccataggagagaagcagagctgggcaccccagggagaggcgcgggtgggcacatgcggccccaccatgaagagccccgtgtgcctggcaagtagttggcaaggcctgtgcttggtgggttctgagcaggctcctactgttctagaccaaagcaggaaagttgaaggcccactaggaggtaaaatacaatgcctgataggagagggtggtgcctgaactggagaagtcacaggatggagagagcaggtggagatggattcagagggttggggaatgattgcattctgcagagccagtgaggcccatggctgggatgttggggtgatggtgatccagacaagagctactcacagggaagtggaagggacagcgatgaatcttgcttcaaagcacattccctaggattgggttttttagagcagttttacatttagggaaaaattgaacagaaagcacagagagttcccacacatgccccatacccctcccccaataatcctattttcattaacatcttgccttagcatgctacacttgttacagttgatgaaccaatattgatgcattattatcagttaaagttcataagagggttgactcttggtggtgtacattctatgggttttgacaaatgtataatgtcacgtgccctcaattacaggatcatacagagtcatttcactgccctaaacatctcctgagctccacctgttcgtccctccctcccccttgaactcctaacaaccaccgatcttttgacgtctctatagttttgaattttccagaatgtcatctagttggactcacacagcatgtggacttttcaaactggcttcttttacttagcaagaggtgttttttttttgtttttttttttttatggagtctcactctgtcacccaggctggagtgcagtggcacgatcttggctcactgcaacctccacctcccagcttcaaacaatttccctgcctcagcttcctgagtagctgggattacagatgcatgccaccatgccctgctaatttttgtatttttagtagagacggggtttcaccctgttggccaggttggtctcaagctcccaacctcagatgatccacctgtctcagcctcccaaagtgctgggattacaggtgtgagtcactgcgccaggccagcaagatgcttttacggttccgtgtatgtctttctgtggattgctgtgtctttgaattttcaaggtgctgtgttagtatgatggttgtgaagcctgagatgagaagaagccatgagacaccagataaagccatcagaggagcaatgttttgccaaccaatggctcagagcccaccctgtccccaccctgccactaggaacccttgcccagttctagaggaggcaaaatcatggatgtgtcactggctaatgtccttgtccaagagtgacacaaaggcaggtagagtttcccggaagaccatgttacctgccttcatgggcagaataaatttctcctttacctatctagagagtcttacccaggcagctcagagacccctgtgctcaggctgctcctggtggggtgaggggtagatggcaaacacccagccgagggtcctgtctcccctccccgtgagaccccagggccccaccatctggggcacgctggctgctttccctgcccagcatgtccagcgggctgccttgatgagctcaccctggaacatacagagcctcttcacatgtttttctttttctcttcttattaaaacaataatagcttgactacaaaactattaatctggcagtaaattatgggaaatttattgctatggttgtttttcaaaaattggccatattatcccagaggaggtacaattaaacattgaagaataaaagtcacaaatgatttggacggcgcctcttgtctgaaggtttcagagaccgcctatcctttttccatcaaatgctctgcagatggcctcagatgctgagacgtggcagaactcagtccaaggataaccatgaagttgtccatggaatgattgcgcctcattccttgctgttccctgttgctcttgcagcctcctgtttgtgtttcagagcatgcttattgtgtggtaggaactaggagccaacagggttcctaaaggtagcttgatcttgaccagcgggcttccagtacagtcaagatattgccagaaccgccaggaattgggtaactgatgagagaagagaagaaaatcttgtaaatagaaatgccgaagatggtgagaaaatgagagaaagaatgacagtgtaggttaaagagggtcccaatgacagaatcctcccaaaatatgttcaaagagggaaaagtacacttggattctggagaagagggttctttactgtgcctggggtcgtggtagtcatagcaatctgggacagggtgtctacatatttggggccctgggatcgtgcagaatcatggagagtataatcccaaataaaggcgctggacaacaccacttgtagatttcagggaaggagagagatggcagccactggtgtggtccagtgcaaagagtggctgaaggtcttaggtaggggagatgctccccaaaagagcaggcactggggaggagtgtcctgtggttgtagccaaggtgaagtggagacaagtttgagtagatgctgggggtcttgaaagccacccagagaatgtcatttgttcattccttccacccacatccactgggcacccactatatgccaagcactgtgcagggcagagagcaaaccctgccttgggccattcaggctttgttctgtaggcagagccatggagagctgatgagtgacggagggccaaggtgactctgggttctagagagacgctccaggcacacttcttcccttcacccggtcatgtttcctgacctcacatctggtgttatctttgtggggaagaattcttcgtctccctgtctcatcccaactcaggatgggttccttggagtaggcgtggagaccgtctatccagaccatcccctggatggaccttgatttgtgcaggaggggctccatgaacatcctagccccatgagcctgctttggacgtctgcagatccaggttagagtccaggctttgcctccagctccccccatgacagagcaagtcatttagtgccctggattctaacagtagcagcagcagcagcagcagctctcaccagggcagtgttcagactcattcattcctttctctttcatcgctgggtcagccccctgctcacgatcacctttgaagtggacactattaatattcttgttttacagaggaggaaactgaagactcaagaggtgaaagaagtcacttgccccatggccacccagccgatgtcacagatggggcttagatctggggttgtcaagtcctgcagccttgcaccacctcaactaaagggttggcatgtgctgggtgaaatgccagttcggagtctgtgaccgtcctctcccgtttgacatgactcgggatgacactgcagacggaatgaaaagccccacctggctggctttcacatcatgctcttccctggtagcttcccagccctggagagccacaaacagcgaaactgtgagagaaagaggttggcatggctattccaccactctttctgtcctacgtgattcacttctctcttgcccttcctaagccagagccaggcctgtaactggaaagtggcatctccttagtttttgacactgggataactattctggcaagtttatttctctgtgagtttacttttcatcctgatctatccagttggtctataaggactctgagaggagcagctgacagagaaacaagaggagggaggcagggcctggggttctggaaggagatggtcgcagtggtgggacaggaagattttagtctgcccatcgaggctgtgacatgttccagctctctgcttttctagcattaggttgtgattagccttgtggtgagtccacctgggtctttctggaaggttgctgtccttcctgcttgggctatgtatccaggatccttggaagaaactgttctggtcagctgtgaggaaagggacatatcctaggctttttctgctcgtggtcacccccagacagccccagcttcttcaagaagccttcagagcagcgagaaatcatgcaggaaaacacctcctcccagctgttgggaagcccggcattctatacgaggatttgtttcattttttggatgttggtagaaatacgtaaaacgatgctcgtaaaaggctgggaagacggctggactgcacagccggccgggaccgcaatgaaattaaaaataaacaaggacaaatggtgggaaattattgcaaaaatattttctccgaattgaggagggcagtagggagatgagaagaagtaacttattggaggttggggaaagggcaggacttgctttaataaacatcttacaagaaagccaaggagcgtctttcttggatccataacaagtcgtgcactcaacatgctccaggaatacggcctagtggaattaacgaaggaatctgcgtcctgtcaacatgtggtagcaggcactaacgagctcacaccctaaaacgaagcagatggggctttgttggaagaaaaagccttacattaggtttcagaggtattataggataatgataataacacctattttctgctttgtccaaagcttccccatctttgtcaatcggacagcatcatgaggatcctcagccacgcttgatggacaggaagctggtggctcagctgtgaggcttataggcctgcccaggtagacggggtgggaacaggtgccgaaccaaggcttccttccctgagatcccttccagaagaagtagcttttctgtgacttctacatgacaattccttgttcctattctcctctggagtttgaaaaccagggccagatatgttccataggatgccaaagtgatccctccctccctacctccctacctccagctccttccttccttcttctcttccttccttccttccccccttccttccttgcactgaattagttgcatttgaaaatggagagaattcatgttacaatccagatacacagcttctctggaaaagttaaatctgtcaacaatggctgtggtgctcatagtaagacatggctggatagagcaggtgcttttccattgacagtcaaccccagcccacatccatcctcatttcctcctgcctgccgctctaaggtgttggagtctgtaacctcagattcttggccagaacccacctataacccacctatctggggcaagcactctgccaaatcttcaaggcaaatgaagaaacagagatggagagaatgatctggataactaaagggggaagttttagttcttgccagaatttggtggacaatatgcaatgatgtccacattcaagttcaagctcatcacattcccaccaagtcctccacagcttgaatttacatgaaacaacttaagagtttatgggtgtagttccaatccagctagactatgtcaagttcagctcacctgtttggttatgttaagggtcttttaaaaatatcagtggaaactaaatgctcatcaataaaggactggctaaatgagatattgcatagagggaactctaattcgcagttaagatgaatgaactgcagctctgttgatataaatttaaacacacacacaaaatgatgttctataatgggagctggcaaagtaccatccggtgctcgtttttgtaaataaagttttattggcacacatccatacccatttgtttacatatcgtatgtggctgctttcacacacagtggcagagctgagtagctgcaacagagaccatatggtccgcaaagctgaaaatgtttctcagtgggccatttacagaaaaatatttgctctccactaccctgtgttatttggactacatacgtacatatgtatgtatatatacacattatatatacatatgtatgtgtgtgtatacacacacagagagatatttaagttcatggcagaggttgattttgagtggtggtccaaagttagatcataaatagcatcaacttttcttgatctgaaaattctatttctctagtttaaaataatacttggaacaatatgaagaaatgttaacagctgtcaaatttcagttaaggattcacaggtgtttgttttattatcttttaacttttctgtgtttaaaatgttttaaataaaaaattatttcatagaacaaaaaagttttaggactggaacaattacatctaaattataaaattcttagagtgacgtttataattacatgtttaaaatgatctaccatagggatcttcttaactattcggtgtattatccctagttttagtctacattatatgggaagacaggatttctttttcagattttcttatacgtgtatattttacaaattctcttctatatctttataaatagtttctaggtacaaccgacaaattatcttaattcaggcaccaattttccctcgtggtcctgtttcacttgccctcaacacagaagcaactaataggcccatccaagaacaacagtcagttatgcaaccagtgccttccagcatgtaaataaccccgtctagaaatccaggaaaaataaccagccctgagtctcgtctcacttactcaaatcacatggacaatttacgtccatgaattggaatttcaatttgatctcagagtttacttgcgggggccaaggcacattatagtggggaggaaagggagctgctgaagctaagaagaactggaattaaagtcatgcaaagcagatgccgggactagtgggtgccaatgcaaggcaggtgctgggtggggccaggtgacttgggaagagtgggctccccaacctgggccagcctttgggcagcttaggggacagtggccgagcagcgggatctggggtcggcagttgctccatctccagctctttcaaggaattgagcgtggagtctggcaatttcaacagagtatatcttcttctatacctgaatgaaggattattctcaaactgctgggcagccaagtgggtgtctttcgaaaacagacttctggaatttcccagacttcttgcaaataatccacagtactttgttggggtggaaaaacctgaatttcttcctactatgtctggaatatatacagtaaagtctttatgacttgacagggtgtgcctggccgggaagacctctgctcttggccaggctgtgtggcaatgaactcggtgatctggggagattgggcccctccaggggtctctgcctgaggggtgggggggctgggagtgtcaggggccccagcctttgtccttagatttcctacaagtcagatgatcttggacgtggtttgtgatcactgcagatgttgccaggttggctgccagcttctgagaggcctggatggagaatgaaggagacagggagaatgagcaactggctctgagacccagagcggggcaggaggggcccctttccctgtgtgggtgtggcctccaaccgggggccctatgaaggcctctcccaagactctctgcagccgtatagttccatgacctcacagccatctagcctggctgggagtgttcattcgtctggcagcatgaagtgtccttctccagttctaatctgtctgcaaagtcctcagaacccagctttccacaccatcccccagacccgtcacagctgcctgcccaatcccccacagagaagtcttcaggagaagggactcgggtcagacataaacctgggctcgagtcctgcctgccacttgctagctcggtgacctcaacaagtactcaacttctccaaagcacacattcatcacccaggaaacagggatgatctcagttaccgccttctaggggtgtgacaaagactcagggacatgaggaccagagttctgggcccatggctggcctgtagcactcaacctaggatgcctcctgagaccagagatggttccagtccttctctactggggagaggcacttttgctgatgccctctgttggcctctgcagagccccccttagcctctgcccttcccaaccggggaggctgccaggcacaggcaaggtcagggtcccggccttccctaccgaccccagctgacaggggtgagttccaacaccacagcctacctgggggtcctggccggtggcacggctccctcctccctcccccagtctcgtagacaattcccttttcacccagggaccctctcttgcacgccccgcatggctccgctcactcatatgtggagccttcctctgtgctgacaccgtcctatgggctggaaatggcattggccaaggaggccgggatgttaaggagaaggcatttggggggaggaccacagaaggaatggaaagggcgtgcaggcaggggttaggacctcagctgaaatagcacaggacagtgtcggggtggctaggccatgcttcaggcaggctgctcagggaaggctgtctggggaggagggggcgcgcgggcttaaacctggctgggcagaaggaggcacctggccaggaaaggagggcatgggtttcgggcctggggaacagccgctgcgaagacccagtggagggttggggagggggtgtgggcaagcccaggtcaggtccctgaattttgggggaggagtcaggatccaccactaagcggccagagtgctgggggttgttggaaggtctgagttccactttagaaagctcaccccacccccccaactgggtggagaatgacctgcagtgggagggggagagtaagaggggagagagggtgatggcttggtccggggtgggagacctggaaggaaggagacggaccgcatgactcaagtccaggaatgagtctgcactcagtctctcctgccctttactatggggcacgctttctcatttcagctcaggctaaattaaactaatttagcttcatggaacctaagaatgaatggatggcccagtgaccccaaagtggctgaaataagagaatcaaaaagccctctgcaccgagggcataatggaagatgcttctgggccccaacctgctcagtcacagctgggttgtaataaatgaacacatttgggaactctgttgtatttcgcttcgtcaaaacgaaacaatggaatgtgccaccctggttcctattgaaaggcaccctggcccccagaactgctctgaatacctaggactgtattatcaggatttctcagaaatctcttccaaacacagctgccgctctttagggaatggttgactttaattattgagaattactttaagattcatgtttttcctcatgttactgaaaagtaatcattgtaataatgaagaccacatgtgtcctgggtctaattattaaatcattatattgttatatcattcctattagttgctttggcgaaagggtcaaatgaaaaaagtcagggcattcttttttatgtcgacattttattttctatcaatacaattcgctccagcccgagacatggcagaatgggacgtgagctggcctgcatgggggctcggctttggccttcatggcggttgggtccggagggaggtgagcagtgcccttgactgatgcactgtccgtcgctgctggactagggctgggactgggccccagagccagggtctccagcgctggcaagggggagctgctgggtccttcctttcgctgggccttctccttggatccattggcccctgtaggtactgctgtccggccttcctgctttccccaaagtcctcaaaaagtgtttgggctctaaaagataaaaacaaaacagcgaaagtagaatgagtaaatgtttgagtacacatctagaagtttcgatgacttcaagtatagtaaactgtagtcgctttcctcgtaataaagtgtaagtcatcagaataaaatgagcaaaacagatgtatcttaaaatgcaaactaaaacattataagaaaatggtaaggacaaattacagtaatttgtgactttgcatgtgagtaaaatcctgaataatcgagaaagaaagatgatcaaaatcttttcagagattcttgcagcaaaaaaaaaatctcatgtgacctggtaagagttgttgcagggctcggtgtggccagacccaagaggccctgcagcacctgtcatgggggactcgtgctctgtgtcacgtagtagctgctcaataattcctcctggaggggattgctgatggagtccttgcttttccctggaaacagtggattgtcaagctccagacagaggaaacttaatttgattttgtcccctgagtcagtactgattaaggctatcataaagtaaattggctgagttggggcccgtttcaggaggagctggagttgctctgcagcccagcctggttctgagggccccaggtggtggagtctgcagcaatggaggaggggagatgggcactctgtattaacccagctgcaggcgagagggtttagggggggatatgtgagcctccagggttgcaagtctgccctgccctttgctcagaccaacacgtctgagttgccatgcattcgaagagtgggtgccatggttcccagcagacatgtggctcaggacttggccagatatgcctgggtaccccatgtacctggcctatgccggtacctcatgtgtgagctctgtgaccctgcatggggatctcccatctctgagtctcttcatctctgtagttactgtgaggaattcaatgtgtgctaaatgcccagaagcgtgtccagcacaccttttatgatagggcatgtcggtgcacgtggcactgcacagctggtttcccatctcctctgctgggggacggggctgagtcagttacctttgccagcatgtttccagcactcagcaaagagtgtggcacagagtaacctctcagaggtggtttgctgaatgagcacaccaacccttagctcatgtgacccccaaatcccagctcaggatggaaaaggcaaattgggagcggggccagagctaggagaggtacaggatggagagaagttgctgggaagggaggccgaggtaaggccgggccggtgaaaatgggaacatgttactcaacctctgccatgctggggcctggggaaaaggatgcctgcagctttatggaggatgggagggagctggctgtagttgtgtgagggcccttgggactgtaaagctggagaaacctgaggagggttgtcaaaggtgtgttggcctgctgccattagattactttggttgcaagtaatggaaaaccaaactcaagttgacttaaacaattaaggcaagttattggttcctgtaaagcctgaaaagtcccaaagtggatctaacttcagtttagctagatccaaggacacacagcagtggcaccaaggacccactttctttcaatcttgttgttcaacctcttataaagtcagccagggcatttgcatgttgtcccaacatttgtcacttgcaaatggctctctctactgcacaggacatcataggaaaatcccagagcaagagggatgggactgagtcctggtgctgagactctggggagggacagactactttgtgattactcaaaaggcgaggaggggtgatgaaataagccatttctaaactgtgcttcccagacctcagggtcatcccagaggaaggggctgaagggaaagggaaggagatgggtgagcttccaattcactcagaagggctcctcttttatccaccttccatgaaggagttcagacacagaaaggctcaggtgtaagcctgaaactcaccaaacgagctggtccgaagcacattttactttgagtgctcactgtgtgctctgttgagtgtattaatggcttcatagcaacccaggaagtggatgctattacaaccctccctttatctatgagaaagtggaggcccagttagctagtggtaaagccagaaaatctgactccaaagcctgtgggacaaacccatctctccaccgagccatcttctgtacacagccacccttttaaacacagatgcagtaatgcacacagtaggtgttcagcaagtgtttcctgactgaatgactgactgcaggtctgcctgggtccatggctcatgctctttgtacacttcatttctctcaagtaggacaatgtttagcattcctccaaagaaccctgctgtcatctttgggagttaagaagttcagttcttccctgtttttgtaattacaggatgaccccaggtccattttccaggaattctttgaattgagagggaccaaactatgaaggaatgctgatgagccttagaattggtttctgtctgcgtcccacttcttgcaaacccctagttattaaacactgtaattcttgcatctataggagccctttccccaattagtaaatagatatgcctgactgcagtcacttgacttggctgactcattcattcctttactcacttattcactcattccttcactcactcattcactcattccctcactcattcattccttcactcattcattcattcattcacccattcacatattcacttattcattcactcactcattcactcatttattcactcacttactcatttattcactcacttattccctcactcattcactcattccttcactcattcattcattccttcactcattcacccactcattcattcattccttcactcattcattctcccattcacttattcattcattcactaagtcattcattcattcacccattcactaatttattccctcattcactaatttattccctcattcactaatttattccctcattcagtcactgactgactcattcattcaatcactcattcacacagacattcattcattcactcactcaatatattcattctctcactcaggcattcattcactcagtcactcattcattcaccccctcatgtattcagatattttatagagcagctccacatgttcattacagttgtgggcactgtagaacatgatgttgaacaaggtaggtccctgttgtcatagaactaaatgcccacagggggcactggacctgcagacaaataagcaatgctaacggtggcaccagaagagggtgaggggtgccctggcagtagttccagcaggacctgcctttctgggcatcacaggaagagatcgccctgtggaggaaaggagttaccgaggaaaggagttaccaaggcaaggggagtgaggttggagggaatggagagaagtgttcatgttccaggcagagggtacaacaggggcaaagggcagctggacgtgggttccagaaacggaaagcagcagtgaagtgggaacatgggagggagccaagggagcgcaggatccttgccatagtgtcagtgctgcggtatcgcgagccatctccaattgcttctctcatgcttggacgtgtaactcttgcattcctgagagctgcaagccctacaggaactgaaggtaggtcatccccctcaggaatgctgcaaagagcaggagcatggccctggggaaaggaggctcccacaagacccacttgggtaccagtcgggggacccaggcccccatcacgtcccaacagccccacagacctgtccctctggaaaagcaatggtttggcgaagtgtcaacagcatagcccaggaagattctggagatacctaaattaaagcagcatgagtgtaggggagcccctgtttctcaaagccgggggtgccaaatgttatggtggaagcatctggaagctatggattgaggcacaagagcaaaaatgagatgaattcagtgcagtccagactctcctgtctcctgcccacaacccccagggcgctcagtggagacggacccccgcaggtccttgaaaagcaaggagtggctcaataagtaggttgatttgcatttaataggggcacaaattgcaacaacaactaaccgtggtgacaagcaattatattcggctgaaattaaaaatgaaagtaaaagaaggaacacataagaaattcagccatttccttcttggtcatggggatagagggaggatgacagacagagctctggctcacaagaactcacacttggttgaattcaaggctgtcaccgtcctgaaattcttagcgatgttgaacaacggggccaacacatgatgcggctgggcccaaatacagaatctggctgccatatctggtttgtgcctccatgaaattgtccttccctctgtcatacaaatgtattccatcctatttctcagatgattttgtggcagcattttctttttttttcttatttacccagccttttaaagtatggtatagcatgtgatcagcaaagtttacaaatcgtatgagatgactttttaatatatggtccaactcttgtaaaagtattaaaacttccgtcccccacagaaggttcctggcacatatttggagtcacctggccaggaatccaccaacctgatcactatcaccatgggtacattttgtggcactatttcacctcagaaagattttcttttctttttttcttctttttctttctttcttttcttttttttttttttttttggagactgagtctcactctgtctccaggctggagtgcagtggcgtgatctcagctcactgcaacctccgcctcctggattcaaatgattctcctgcctcagcttcccgagtagctgggattacaagtgcctgccaccacgcccagctaattttttgtatttttagtagagatggggtttcgccatgttggccaggctggtctcgaacttgtgatctgcctgccttggcctcccaaagcactgagattacaggcatgagccaccgtgcctggtcaaagattttcttatctttttttttttttttttttttttttggcagattcactcttgtagcccaggctggagtgcagtggcatgatctcagctcactgcagcctttgcctcccaggttcaagtgattctcctgccttagcctcctgagtagctgggactatagatgcccgccaccacgcctgactaatttttgtagttttagtaaagacggccaggctggtctcgaactcctgacctcaggtgatccacctgtctcgccctcccaaagtgctgggattatggcatgagccactgtgcccggccaagattgttttatataatttcccaactactcttgtgggttattcaggcccctgggaatccaggaaatcctaaggggagaaataaaacatagaacttcaagtaactctcactatggcaaaagcacctaaagttgaaagatgttctaagtctttcaaataatgtaagacataattccattttggaggtgcatttctgcaatgagattcttgggtcttttaggcggtgctttcagggatctggaatcatatattttgagatgatagattatcttaaattatcttaattgtttcattaacatgaacttgatataaagtagcctcttgaagtgcattgtaaggagggaaaagagattaataacctaatcaagcatttggaaacaactgacatgcctcatggagagagtactctaaaaatttcatttaaaaatgtaattatattgattggaaagatggatttctttgtttcagagagcagatcttatagtttgagagcatttagctgaattgatagaattatatttaaaatgctatcttcttaattgcatcaaaacgtaattttcaggcttttactgcagaaagagttgggtttctggagccttctgcccttttaatgttgatttcaggtgaccactggtgttcctgggaaaaagaaacataaaaacaaaaggatttatatttacggtattttagttcagagccaaccttgtggtagggaaggtggctgtgacctttgtaggtggcggtgcaggtgtgaggggataaggagggggcgctctgccaaagctctttaaggaatgcaccccaactctgggtcctcggtgacctcaaccttcctccctggatgctgccttttctttctggagtaagaccttggcatatttttaaaaatcttcttggcagtgtcagattttcgttatttgaggaaggttgcatttttcgaaagaagtcgtttggagctaagactaggtcatgatacgcagggaaatatcactctgagataatattccagacaatgagtcaagtccccaaagccaaggctgatcttctcacatggcttcaaaagcccctggactttcgtcctgagggtccccttcctccgggccatgcacgcatgaagatgttcaagcacctttttgcaaatagctgcataaacaaacaaggaaacaaactagaaaactacctaaatgcctcggattgggccttgcggaggctcctgccacctgtgccccacaagagattttcactataaagacactgagagatatgaaaacatttctgagagaatgtcgggttgggggatcccaagaatcaaactgtaagtacacacgacagctgcaaaaataaaaagagctgctgtgtcagggtgttgggattgggggacttttcctcttgttttcacctaaaactgtgtcttaatgaaaaccaaaatccaaagaacaaagagaagcatgtaaaaagttctataaaaagcaggctcctgtgcaatgtatttctgaaggagaaatgacaaagtttgggccggtgatgctgtctttagatgctgtctcagaatatatcataatctcttaaggtaaccttggctggagaagacactgtgtgtttggaagcgtatgtttccttacattacttactaatagtaataaatagcatttgtggagtttacagaaaatattcctgcaaaataactcaccccatccagtgcaacccagagaggctattgctcctatctctacatgacagggggggataagggatgctgggaaggccctagatgatgttactgagggttcacagcaacaggatgggaccccaagtaagtagcctgtctccccatctgaggcctcattcagggggaaaaggacttgagaagataccagtctgttcgtttttttttttttttttttttttgagacggagtctcgctctgtcgcccaggctggagtgcagtggcacaatctcggctcactgcaaccttcgcctcccgggttcaagcgattctcctgcctcagcctcccgaatagctgggattacaggcacgcgccaccatgcccagctaatttttgtatttttagtagagacggggtttcaccatgttggccaggatggtctcgatctcatgacctcgtgatccgcccgcctcggcctcccaaagtgctggaattacaggcgtgagccaccagataccagtctgttctatcctctgacacagggaggctctcttgtctacactccctccccataggtttcccaattttgttcaaaattggtttcactcaatccccatggcatccctcaaaatgcctgctgactatttgaccggactacctcttgcaggtaggagacgaaatcccaatttgaagtcaggagatcacaaactcaaattcctacaggagtcagagctagggatgacagtccctgttctcatattaaatacataggaatcctctttactctctcatagaaaggtctattccctaattttttactcaaaacatgaaactcttttgatttatctgttcccattatttacaaagcctgagataaagagagatattcatctaatttaagaaaagcaccatgcaaccaactgataattggcaagaaaaaatagactcagggaaacaatagagaatggtggggattgtggcaaaattggagtgttcacattttatccaaagggagctcagttacaactgatagctgccatgtgaaaaagaagaccctatgttgttatgttttcctattttcaagaagaagctggagacccaaatatgagaaatttcgcaattttgaagtatattgaaagagagagtctcattttgaagaatttcaagaaattatatcagttaagtgtcttggtttgggtttccccagaaacagaccatgagacaaggactcaaagacaaatggtctatttgggagacaatctcaggaaatacccctgggagagtgggaagggagagtcggggaggagaagaagaacagatatgctctcgaacagtaacttctggaagcagcaaaggttcagattggtcagagatggtatagaacagtgctttccaaatggtctatggtgaaagatttgtttctgttgccaagccatggagggttgatatttttgtaaaataagaaatgggaacaggccgggcatggtggctcacacctgtaatcccagcactttgggaggccaaggcgggaggatcacaaggtcgggagtttgagaccagcctggccaatatggtgaaatcccgtctctgctaaaatacaaaaattagccgagtgtggtggcaggtgtctgtggtgccagctacttgggaggctgaggcaggagaattgcttgaacccaggaggcggaggttgcagtgagccgagaccatgccactccactctagcctgggtgacagagcgagattctgtcccccgctccccgtcaaaaaaaaaaaaaaaaaaaggaacaaagccatagaaaatataagccccatttaaaaattattaatttgcttcaacagttgtaaattaatgttccaaactgctgtaaaaatttctaaatgcttgtgctcaatttcagtacttagcccatcacaggctggtaataaacagctgagaaaaccagcccacactgatgcggacccatgcttggagtactgggacgggtgcagatagctcatgactatcccatctgagggtggaggaacctgggatatttatccaccccgtcctgcttgcacacgattaggggctgtttccaggggcaattccatgtgtgctaggtaggccgggggttcctgcagccaaacagccccgcagttgagagttgcgaggaatgctggaagcagcctttcggggtagaggtgagtgctaagggaatgtggacggggcggcaacagcaactgctaactgaaagtcttgattcctctcagctccatcgccatggttctcaaagtgtggcacctgggctggtagtgccagcatcacctgggaacttgttagaaacgcaaattcacaggccccactccagacctaccaaagcagaacctgtgagggtggaagcccaaccatgtggattttgacaagcctcccagagaattctaatatatgctcaagtttgagaaccacagctcgattgcattttaaagcaattaggccaaggggaaatatccttgttcttacataaaaccaagatgaccttaactagcattggctcctttctttcaacaggctcaaagtgaactcattttcataagaattgcattgtttaaataaatatgaagtttaaactgtatatatcctgtcccatgccaataagtccaatgcatacaaatcactttaaaatccacccatggagatctgtactcagtgatgttgctagaatcactcctctgttagatatcaatagtggcagatgataaactctcttctgcaatgtgacaccttctttactaatagaccattacgctgtctgaatcagagtttcactgattaaacaggaaatgccatctgtagagtctggtatccttccagggtctgcaaaggttgggaccagataaaaaataaaaagccttttctttgctcaacttttaaaacaattattcttatttttcaaggcgtattcatataaacaaagagagcctggtcataacctatgaaataggccaaataatagtagggatgtcagtattctggggacaaggaaacagcagcaggatgaggagggacttgccgggtgcatgtgtttgctgagggtggggtcccacctccccacctcttcacctccttccccaccccttccccacctggtgctgtttatttcctttaacaagaaccagaacttggatggttctgctcaaacacagcagctctgacacccctagaaaggctgggaaacatggaggttctgtttagctttctgtccctgctgtcgtgaaatagcccctcgtgaatgaaattctgcgcacagcgtcaccacccagcggagcgtcacctgctctaggcctcacctcccaggtggtcagggtttgttgataccttggtgtcgccaatgagtctgatgaagacagaaggttttcattaagtagataattgctcctgagaatagaaatgcaaacggaagcacaacaaatgtgctttgctatttgtagacatttgtcaagtttaagagaatgggccacattaatttgaaggtttaatttcttggcatttgtggctgtctctgttaaagtggttctcatctggggtgattttggcctccccccgccccccactgtgggtacattggaaaatgtctggggacgtttttggttgtcacaagcagggggtggggaggttgctgatattgagtggatggggatcagggatgctgctatacatcctgcaatgcacagaccttcaccacagagaatgagctgacccaggctaagaaatgctgctcacatgtatacatatgtaacaaacctgcacattgtgcacatgtaccctaaaacttaaagtataataatttaaaaaaagacagaaattctgctctatggctttaagccagtacaatttttcacaatcaatcataataaaccaaacacactagaaaaatagaagaagttggggggagggatttttagcattaaaagtacagatttgctataagtgaagctggatgtcttggttttgtccctctttgccttaggaagggttatgcccactgagagttcattagttagtatttttcgggtctattttaggcaaccaaccaaccaatttattttttttaatgaaagtttaaaccctcaccttgggcgaactgtatcgaaatatggattaggtgtgcacaggcttttcctgctttggccagccactggcctgaagaaaatgctaacctttctcactcgaacagttcagctgcctttgatggatttttattgagtgtctactctgttagccaccacagagttactgttaggttggggggaactgggagagaagaggttcaggccaagtaaaaagtacaatgtcagaaggagaccagcgaggagctaataggggtgagactcagaggagctgaggagggagagaaagggagaggcagggtcaggaaggtcttccatgagccccggcccccaagaacaccaggtttctaccaaggcacaactactccaaagccctagagaaaattctctgaagtcacatgtggtagaaatttcactggaattcagaagtgggtctatttggtttccttctttctactccttcatccttctacctgctttcccaaacactggcaccaagaagaaaacaaaagtctccgatgcacaagctccctagagcccagaagcaggtcttccagtttcttaactggagacataaaggcaatcatgcctgcctccttcctcctgtagaaatgaatacattttggtaaactatttgaagatgcacaggaagacgcaatcattcccagctgaaatggaccattgcagactcacctcatgaaacacatctcatctgccccctctcataatcggattattagtgtgaaaatggagcccacgtgcccggttagggatatacaataatgttaataatatttatgatgtctagagggccttcctttggtctggtggttgggaaaggggttggagtggttctaacataatcttcacaacagaagcctgggtcccaccaagagaagatgccctgagacagacgctgtcctgagagtccatgaaggaatgacgctcctttccagtactaggcagacccagtaactcctacttccaagcatgtgactgggacagccccattttccaaggagctggtgtgatggtttttgacctgatagtggtgacttggttccagttgtttcctgaatgtttttacagaaataaccaatgtatttccggtgcagtgttctatcttagctgacaaaacaagaggtgaggctcagcctggagtgattccattaaaccggatgggcacaagatacgggccaatctggttaccgtcctggaagagatttcatctagaggcggctaaacaggaaattggaatttctctcctctcaaatgattcattatcgctacagcatcttaataaaacagacaaggggtcagtaattcgagctcggtaattaagtggaaaaagaacagcttagtacaacggttgagcaccgtaatagattctgacatataaatgaagggaaggggagtggggatgacaaggtagatgagatattagacagctggccctgagcttgtcattttccagttggtgcagaacggggctttgttcaggtaaaatggcttttgttggccggggccactgttgcggcctttgacaggcggcccaggcaatttcatttatccagattataagacaattaaatgaaaatgaaatgtttgtgtatttccatttcttttaatactggcaaatgcaaagtttcctaagaagcttgcctggaaaaagaaattcatctcggctttcaaagtgggtggagtggagaagtaaaattccttctgtgattttggggcctatacgaggaagaaggaatttcacaggaaaatggaaagaaagaaaaaaaaaaaaaacacctccagctgtcatcttcactgtgcttatctcttgcctaattataagattgagagaccattgccccaggcagtgcagggcttggtttaagaaagagagctgtaaggatgcttggtttacctaaacaataggctttgtcaaatacctatggagcgggtgagctgtcattccaggagctggttttccagcactctgaactgtcttgtgccttccagcagccctgctctgtaattaaacagccaacctggagattaggggctcccgtgaagggattcattgcaggtaccgcacatgtctgtagctagaacccagttttatggaccttctggttgtcaagttttgctctcattttccctttcctcttcagagataatcacacaaacaatttcatttgtctttcatgcagagagagaaatagcaggtttaacagtcctgaacacccatctatggttatctcagtgttctttatctctgagtcaggggaattttctacctgttgacattcatgtcttcctgaatgccctggcgactcctgttctcagggccacccagcgccactgccacgacttccaacagatggttgtttcttcctatacctctgtcctggccccagctgtccagccaggtcctttttcccttccagggttggaaagtacttctgcctgcaattttccaagccttgagcatgttaatcagttgctccagatctgctggttgaattttaggccaccagcacagagcacaatggctggactcaggtgtcagatgcccaaagaggggcaggggctgcgagaacctggcgtggtacagcacagtgaaaatatcgagtgccagtcaggtctcgcggcctaggcacttgctttacaacaagctaattattttatcggtttcctctgcatgtggcaaaggacggtggagctgcaggaagcacttcgattcttctgttctatcaaggttcaagttgatgcacagaaacgggaaacccaccaggactctctccttcttagacagggaagggatgagagtctcgtaaatggagtcctggtcaaactctggcttaccatggcccactgggccccgagactccccagggtcactgcctggtctggtccgggtgcatattttgggctgccatgcccggcaggtggagccatcccacatcagctctgtgttctgtgtaagagcactctcagtggggaaggtcaagtgttccctcagcagcttcagcctctctggtccagatatcccatctcaggaggcaggtcgtgatgagtaccaaccttaaaaatctaaaagattcagggatgagggtccgcttcatatctctgtgtgcttcacctatctagcccctgcagaaagggactgagtcctgcaggatgaccatagaccaccataagctcgcccaggtagtatagtatccctgactcagtttctgtgcctggggcgttactcttgcgagaacaaatgaatttggccttcggtacgtggtctgcagtcactgatggagccaatgagttcttttcaatcccaatcagaaaagaagaccggaaatagtccgcattatcctgagatggacaacagtatgcctttacagttttacccataagtttgccagttaaccatcctgccctctgtcataataaaaatccgggccattaggttatccctaggatatcaccttgatctgtcacgctgatgacatgatcttgatcaggccagaaaagcaaaaggtggtggctgacatgctgcggcccttggaaagccacacacgcacacgcttcagagggttggagataaaccttatgaacatacaggggcctgttacatccctaaaacttttacgggtccggtggtcagaggcatgccaaaacattatcatcaaagtaaaagacagagaacagcatctctgtctgcacctagtaagaaccgactcggccaggcacagtagttcatgcctgtaatcccagcactttgggaggctgaggtgggaggatcacctgaggtcaggagtttgagaccagcctggccagcatggggaaacccatctctactaaaaatacaaaacttatccgggcacggtggcaggtgcctgtaatcccagctactcagctggctgaggcaggagaatcgcttgaacacgggaggcggaggttgcagtgagctgagatcgtaccattgccctccagcctgggcgacagagtgaaactccatctcaaaaagaaaaaaaaaaaacaaaaaaaaaaaaacggattcctggtgtgccttggtagaggtggaatgcccaaccatgggacaccgtgtgactaggaacaccatgtgactagaggtcagaggtcatgcctgcccatcctggggtgtgttctgtcctcactgagtcatgaggttgagtgggcccagcagtggtccatcataaaacggaggtgtcacaggataaagtgcaagcaggaccacaggctaccagcaagcctcatgagcaggtggctcaaagccccttgcctctgcctctgctgtgccactcccattttctaatgaaagtcccctagatccccctttgagggaggccttgctgcctggctgccggcagggcagtctgtagagagccttgagctgacatttcctccagggtcggcctcagctgtggagagctgcaccccctagtctctcctttctgggagccaatgacatgaggtgactaggcgaggcctggccatgtcagactgacgaggatcaccctgaccaccatgcggtgtctcatgcacttcgctggatgcgccagggtgttgggggcctgcatagttcacctcttccctttgcccaaggctgccaccaccctcctcctttaacaagtgctgatcttggatcatcatctcccacttcacattcctcttcagcatctgcttctggaaaacaaccttcccagagacccagcaatagatcagtgatgtaaatctccacaaatgttctccttgctcaaataacaggtctgtgtagctgaatcgtttggtgagatggtttcatttccaggctggtgatggctctgccatctgcaatacttgggttccaagggtatcctgctcatttctctgccagtccatgcgggtaggggtggagaatgtgaaaaggagacgcatctgcttcttaaatgctttggcctcaaagtgacatactgcacagggccacattcactgcacagggggtggggcagccctggttgggtgccacctgctgcccacatggtctccccttggtctcatgtgggtcctggcagaagctgacattgatgctagcaagtgaatgtaagctgtatgtttgggagacgatcctaggaaacactaggagaggatggagaatgacaaggagggagggagaagacccataacaggtgtgttttcaagcaagttgccaccttgtacaagcagagctcacaccagcataactcggggaggaggcagggtagaccatgcctgaagtcagcccaccaggaaggaggtaaccgcatcacccaccgaccctctgctcgtggtcacttgaggctgaccccagcagcatcaactctctggtcctttgggtgttctctgtgtggagagtggcagtgactcagccggcagccctcagcctgtgggtgcaagtgcagggaggaaaccgccgcatcagcctcgcacccttagtatggaagggaagataaattttggtggacagttagcccaatattacctacttaatattgttcttcgaaggtactcacttaaaaatggatttactttttgaagtatttgggctccttccttccctgcctccctccctccttctcttccttcctccctccttccctccctccctccttccttccttccttcctttcttccttccttccccaccccgttcctccttccctttctccccactccttcccttccctccctccctcccttccttccttccttcttccttcctttcaaagcactatgttccaggcactgtgccaactacccagattgtagcagtgcaggaggctcaggaccagccctcagaaattcctgtttgatacagaatgacagaagagttaggttgaagccaatggtaaattccatagaactgaggggatacccatgacctttccgtgaattttttaaatacacattttatttgtaaacaaggcatctccaaatactgttttttgttgttgttgtcattcaggaaaaatgcacacgtgcaagtggaaatgatctctgtgttcatgtgcgtctgtgaatacgtgcctgtgcctgtgtgtgcccgtgcatgtgtgtctgtggtgtggtgacactgtggtcctggggagccctgcacatcaaagggccactggaggagtggttcgctttgcctttgaagagactttctgcctcttgaatgcaaacacagcctatccacctttcctccaactttaataatagttttgtgaaagccccagggactctttgccttgcctaaccttcaaaccagatttacagtcaaggaatgttagacatgaattaattaccccactaaatacaagcaagacacaagtgcacataaaggggaagagagagctccttatcttccgtacagaaaagattaccagaaaatgctgctgcatgattcctcctgccgtctcacctccaatgcattgggaagccacctgctccgagtcattttctaaggagaatccctccctcccccgactccccctcagctccagatccacaaccctgcatccaggcatggatccctcactttcaaggaggcagaggggcaaaacccctgtcttttctattctgggatgaggttttaattgcctcttgttgcagatgtgatttttctgctattagttctaccttctgagaaggtaaatgctttgtgttgtgttacagctgctgtgcattttgtcttttaaattgactttcatttgcctcagctgtgatttcaccaactccatcagtgccatctctggaaacttctcagggaaataataaaaaagttcaaaacaaacagacaatgaaaaaccaaacagctctttattgccaatcttcctgtgaactggcatgacttgggatgccttgggtatataggattaaaaaaaaaaagagaatgttaattgctcccttttcaatttgacttgaaacttatatgataaaagtatttcacttgaaacttacatgatagataaaaacactttaaatacacacacacacacacacacacacacacacacacacacacagagagagagagagagaaattggtaccaaatcttcttcacatcaaactgcactttcgaagttctgcttgtaaataaatgctagaaaagtaacttcacagctgagggcaatgttatgacaattctgtagacttggcccctttagaatgaaagtttcaagatgtgacaaaaaaaaaatggtgatgggtaggggagaaaaaaaaggcccctggagccacagtttattcaatatattgaatccagatttcataaaccacaaaaatgtcaccccagagagcctatgcagaaatgtgttttcttcagaacttctaaagtggaaactgaaatatacaatgaagacaattagatgaaatttggaaaatgtcaaacctaggagacctaggacagctttagtctgggacagctcagaaggggattcatgcctgtatacatgggttggagcggggtggtgttcctaaatgaaggactgcaactgcccggaatgacaggatccagaagtatttgaatcaattaagtcggggagagcagaacttttttgaaattctgcaacgttgctttgtaggtttttaaaaaatcaaatcttgataattccatgtccaggtgaccctgactgtgctaggaggctttgccttccaattccccgtgccaaggtcagtcttgtgggatgtttgcagccacaagggagggaatagcggtttgtaaagtttggcctggacacaaatcaggagggagaccctccatgggcatgcatttggaaattcaggctgacccaacctagttgggggtgggcgagcccagggcagaagagaatgggtggtgtggggaaaggcccaggggtcagcagcctggctccagaccatgtcttccttcctctctcactacggttccttcaacttcttggagtctatttatttgccttcactataaatggggaaacgatggccgcttttccagcttgtggtgaggtttacagagcaagcctgtgcagtgagctttttaagaaattggtttgcttggtgattactgtggacctttgaataacccctcattctccaacacctagaatcacttgtctcttgtgtattgaccaggtcacttctagaaggcagcgttttcatgagccaccctaagcattgctgaggttgacggggggcatggctgttgattcccgtgctgagcaccacacagggagtaacttagggaatcctcactgcaaaacagggagcgtgctgtcttcaagttttgagtgaagaaactaagtcacaaagaagttggaagaccacacctcgagaaaggggtctgtctccgttgtgcaccatcatgcccgactctgtggtccccacagtagctgccagccctaggagctacttacacgtaaatgaactaacatttaatttaaaattccattccttcatcacaacagccacatttcaagtgctcaaaagccacacaaagcccatggctcccatactggttagcgctgatgtggaccatctccatcactgcggaaagttccacggaactgcacgagtccttccatttaaatcccaacccagggacagagggcttataaaacagggtaaatttggtagtgattattcacgtgtgaaaaaagaattgtagactcccaaaaggagttgcccaaatgacttctgttaaccagaggattgaaaagtctatttccagatcattaactgcttgacagaagaggctgttcagggagaggggagagaattggtgatgaggctctggagaacatcttcgaatattgggagatgctttttcatgacaagggtccaaaatgcagatggagcagagtcctcctctgaaggggacaccctcaggccagcaggttccaggtcacctcctcagcattttcctccgactggaattcagctgcaaaaatgggatgcccagcctcacagagcaggtcaatagtgagtctggaatgttccatctgtagactcccacctctctccccacttggcttctggtcctggcttgaccaccaacttgctgtgtgaccttgagcctttgactttctatgcctccacctccccatctgtagatgagaaggctgggtagccctgcagcaccctacacatccccttccatgccttttctcggtcactcattatttgtgtgaggtgagggcagagctcagagcatgaacaagacagcatgacccactcatcccacgctgttgacaacatgacccactcattcaatgctgttgagatgcctacctgtcctccaagttctccaagccggccaagtgtgaggtgcttgtgggtgaatgataacctgggtgagccactgagttcgccttagggttcagtgtccctgggagtagagtaggagccagggattcttgtttaagaagaaatgctctcaggagccacctgtaggggaatgaaagagagggctggaaaaagagccaatcaaagaggtgggttcaggaggatccactcagccccaccccatagcaaagtctggagcctgggttgctcctcaaagtctctccactcctgagtcccagaggcgagagacctaggctggtagactccccctatcaggcagtcactgactctgctcattcattcactccatatctcaatattccccacccctgtagaggaggagatacagcttctcaggcacccccaggcgaggtggcttccactggccaatagcagtcttccaaagattggtgcctgtgtgagccatgagttgttgtggggagggagcgagtgtatcaggcacgtaatggggctttgggcagacacccatagcttcccctacacagttctagcatctttgttttcacaattattctattgttgaaaggcaaggaaagggcatttgatttctgtttgaacttctctcagtccaggttcttgcttttgctttgccttttttcaagtagaggtacattttcattccttccactgtttattgcggtccctcaaatagcagttatatctcctccccgggaagaaatgaaaccatctggttttgtccccagctagctgtgccatgataaatgacagctcaaaggtttcagccagcacagagcacagtggaaagtcgcctcattaacaaagtgtatcattgcatgttctggaacaatccatctcaaaggggcctgcattaattaggaatattttcattcagcatgaggctgtggtagaacatttggccgaatggaaacaggaaagacatacccaattgcccagttcaccaacatgttttgcaaagccttggtatttaaatgtctctaaatagacattgcatttggcttgatgcaacctccccatttaagattcccatttaaaacttttgccttatacatgtgatacttttctcattagtcaaagtgtttccttctaacaaggtaaggtggtcggggaggttgaaaagaattcttttcttgccagaccagaaagaaaggaaatgttttgaaagacttactgttttttgttttgttttgttttgttttgttttgttttgtttttgagacggagtcttgctctgtcaccaggctggagttcggtggcacaatctcggctcactgccacctccgcctcctgggttcaagtgattctcctgcctcagactcccgagtagccgggactacaggcacgcatcaccacgcccagctattgaaagacttactcttaccttttatgatacactaggcttgtgtctgtgtctcaacagctgagagaagcctctggcttcagcttatgcatcttcaaagcctcagatgtctcaatgccctggaagtagccaaattaaatctgacaatgattaggagagtaagaatgttacagtacatgctcttccttgtaaaaggccggaattaggtctgggttgcccctggcttcccgtttgtagcacagatagattggaagtggtgttggaaacagctcagtaggtagaccatgagttgggagttcggatggacctgaattcaaaatcccagtgctgccacttattggctgtggattttggataattcatttaaactctaagcctcaatttcctcctctgtaaaatgggaaaaataatataaatcttatagcattgctatgacaattaagtgtacagagtaaatgcctaatacacattagctatcattattgttaatgacaatatactggcctaaggttcccatagggctcaaaggcaaagtccttgaagaagggtcctccttcctggagggagtttatttcacatgtattttctggagctttcttatcagagggtattgacatttcagtttctggtcttcacctcagagaagagagtgtgggtgggaagacccctcttgggagctgggcttgtcttgactcctacttgggggaatttcatactaagtaagagaggtcagctttctttatggaaactcagccttctccctggactgggcagctcagaacaacacaggctgcaagagagcttttgtgtctttctccggaaggcaacaaggctaagaatgtaagagtgtaggtcagttggtgacctcagagctcagaattctagtggactctgatggtcctgctgataagaaataatgaaaaaaaaattctagagataagggttaaagaagattcccacgccaatcactttccctcccaattacggaagagaaagacgtagaatataatatcataagatttagaagatgacaaaataaccttgccttttctcctccttgggtgaaatttcttccatttttggacccatttctacttcgcttaccagctcacatatgtctgcatgagtttaattaggatgaaacatccatgattcagcacactctttggcaaatgagggaaataagcacagaaataaagacaggaaactacacttgcatgcaagtcttgatcacctgggattcatggcaaatcttcccctggggctctcaaggctgcgtaggatacagatttaaagagggaagcaggagatggcctggagggggtggcgaggctctggtggtgaggctccctgcctggagagagaacacagaagttcctaggagggagaagttcctcgtactgccctgcttaccactgtcgtttttttgcaagaaggaaaaggcatttaaaagtgctttgagacagtcctgtaatggatcaaacaattaaattcaacatgtgtctctttagctcagatattttgttgaaacgtaatgagcgttcgcctcttattgtaaatgaaatattcctcaaggctgccgtaatttggagaaggggattcatgaggagcttttcagcttagccaggcacagggtggcaagtgactgtcagggaaactaactcagcagaggtctgagcagattgtagggactcagaggacggactcagggcatggggtgaaacagaggaggcgccgtgagaatttgtgaatgtaggaagaccgcatgggaaggcggcctttttaatttgcctgtttcctaaccagatcctttccttcccttggagttaggaattttttagaggattctgaaatgaatcaaggcatactattagaatgataccatctacaggacacggatgcccttgcttctctgagtgtggagggaagacactcttggtgcttcttatcactcatttctggcttctttggagagagcctaagagttgttcccatctcctgtgagcaaaggaggctacgtgtctgggtgaagctgtagaagcccccaggctcagaattacagaagcaggggttctctatggcatcccacgggaaaatgactcatgacaaagccatttccagacacagagctatacacgtttctcattcttaccgttaatattcatgttttattgaaaagaaaagtgaaaaacagattgttctttttcctccaagaaggaccccgtttttgtctatgaaggcatgagacgtttatagaacttcctgggaggtcccctgaaataaatcctggacaacaaagccattaaaaaatggagtcaatgatataattttaaaagcaacatgtgcaccaggcgtggtggctcacgcctgtaatcccagcactttaggaggctgaggcgggcggatcacaaggtcaggagatcgagacactcctggacaacatggtgaaaccctgtctctactaacaatacaaaaattagctgggcctggtggcaagtgcctgtaatcccagctactcgggaggctgaggcaggggagtcgcttgaacccaggagtgggaggtttcagtgagccaagatcgtgcctctgcactccagtgtggtgacagagcgagactccatctaaaaaacaacaacaacaacaaacaaacatgtaatacccacaaaatggaaacaaaggagattttgctctcagataaacagatgtccaatgtacatgtttatctatgagggttcatgcaataaacaaatagcagaacacttgttcactcacctagaagctgacatgtgttgagcatctactgcgtgtcaagtccttgctgagttccagggatgtggctgtgagggagacaccttgaccttctcagagctcacagcacagcgctgaggagaaggatgatgaagtgaggtgcccatgtgccaagagaggaataaaaaggaatgggtggtgggttctttggggtgcaggggaaggggtttggagagactcagaactggggagaagcttgaattggatggagaaggagtctccccttctgggcagagcaagcagcacagacgcatggccacattggacgtggggaagggatgccaggtcaaccctgtgtgggagcagaaggatggaagagctgggacaaactcacgaggagccttggaaaccatgctggaactttaggcttcactatggaggcagcaagcggttaacgaagcccataaactcatgtagaatgtgagctgttcttcattttttagtgttcactccaggcggggcaaaaattggaccagaaagggaagagaccaggccctgggaagtcagatagaggctttagcaagagacagttgccaagatgaaactggcccagatgaaactccctgatttcctgactttgacacatgtcagcacacatctctcatcttctaatgagaggcaacagaagagaggtgcagggaaggggcatctccccatcagcagcatttctgaccccaccctatctgggaaatccagagaaatagcatgggaagtggagagggggggatgaggcctctctacatggaggaaacccaggaagagagggcctggaatcccttctctccatcctctgggattggctctctggaaatgaagagaagggtgaagaagccctggtgtgatttctcaggggatgagctgcaagaataggtaggatccctgcaagaccagtgttgatagtggagatggaggtcttaggaaaatcatttcatcgccctggatagagtggctgcctgtaatgaacatgacgctcttcaattcacactgaataaattaattgatggagagcacatggcaggatgcatacattcctcattgatatgcgtcattggaaaccaagaactaatatggaaaaagattgtgtgagcatcttcagcagcccccaggtaatcatgaggcacgagcaaatccagaggtagccttaggaaacgttctaatcccctttccccttgctgctgctgctgcttctactttaattttaaaaagttattgatggcctggctcaaaaatccctgcttttctattcaagcagctttcttgaagtttggaaaatagaaaatactctcctgggtataaagaacacacatttcaagagtgagtaacctggcgaagtgagattaaaaagttggccgtagataccacagttgtcagacacggtgttttattatccaggttcttaaaagtaagtgctaagtaaaggtttcttccaccagtatgcacagaggactattagcttgctctcagattcagtcttctggcgcttcttagacatcgcctccaacacctgctcagctgaatacctgatattgcttttttccctctctccaccttctctctccccgagcaatcaaagcccaaacaaacacttgtcatttgccctctgacatagctaagatttaaaatgtcaacaatatctgaaatataaaacaaatccactgcttctaaaacaacaaccacaaaaagcactaatagttacagagtgtccctgtcagtccctatttatgagacactaaagcattcccaccacagacgtggaccctggggcagctggggaatgggagaagctatgccatgatatagggtgacggatgatggaatgacacttagaagttgagtgttttttgaatttcataggaaatgatgattgctcttggcatggagacacttggatctcctttctctcccgaggatatagttatcctcagactgagctggagcaaacattcagccagggataaatttatgactttagctcatacaagatgtgatacatttgcacatagccaattagcattgggcttctcaagcggatgtccagattcacccttgggtcctcaaaaaacttccaaaagacagctggatgtgaagctggaatgccccagttggaaaaagcctccactatttattggctctattattcagagggcaagctaagccatcttgaggcctcactttcctcatttacagaaggaattaacacggtttacatgtggtgtcaagatcacacgaaagcatgaacatgcaagtttccagcatggtgtccagccttcctgtctctctccagacctccctttcttatttgttcactcatccatccatccatcatggactcccggtcatataccagacaccatgctgtcactgggcacagagctgtcaacaagagagattgtctctggccatgtgcaactcacagactgaagaggagagagaacttttccagactttgctgggaagagagcaaagcagcgatgcttcagagagcactgggcaggagagccggaagtagtcaaggccggccgctgtggggtgggagagaggggacagtagtgttaacacccctgcaagggcatctttttgagcaccccatctgtaccagacaccctgccagcctctgaaaacaacattgattaaaaagaacatccctggctgccaccctcatgaagttcacgatctagtgggggatatggctgttacccaaagaatcacacaaagaagtagaaaatgatgagattggtgtgggcaaaaggaggggctcggtgccaagacggcctatgttagggggatttggcccattaaagggtctgggaacatggccctgaagcaactgtgttcgagctgagccctaaaggtggagtacggccagggcagagggaactactaggccaggagtgcctggggtgtagggcagtggagtgcctggggtgtagggcagtgaaggccctgaaaggaggccgagggcagggtgcagctggaggaggtgcaggtgtaggagagccttgtgggaaagcctggccaggctggctgcccaggactgggccaggctaacaacgcagcatggttctgcagatcgcaggaggcggcccgggtgccaagcagcgcatgagtgacccgagcatcgggggaggtgcatctgccctcagaaggcaggcagagtcgttctctagtctcttttgctccgtttcccatcttacccctccttgtcttccctgggtcgggaaggaccgaagggggcccagcccagcgagttgggagcccaagttggaggtgacttccaccttagtttgctgccctaaaggtactgcccccgggattcccttccaggggcatcttatgtatgtgactgtgttctgctccttcctggtcacctcagtggtaccgcactgcagacactggagtacattttactgatggcaggacaacctaggttgaaaattagtttttgcagcaatgtttataaagtaaaagattgaaaaccctgtgtcatgtccatcagtagggaatgggttgaacagctcacagcaggactccttaactctggcattattgacatttggggggtggggaattccctgtggtgtggcctgtcctgtgcattgcaggatatttagtagcatcctggagggcagaatcaccccccagttaagaaccactggattaagattcatatacgctattgtcttgttgctcagctcaagaaaagaagggagggtcccttttctgattaggaatcccaagcagacccagcatgagcagccctcccttgaagccagcagctcagtgtgaagagctcccagacagcccttgtcaggcctggggacagaggagggtgaggacttgaaaaatcaccagcagagagtagaaatggaaaccacctgtgcacagttttcctctatgcgggctggctctgcagctgcaataagaaacatcgagaaaagctgatgaagtggggaaaaggatccagaacagatgtgtttcctgtacacatttcaaatgtgccgggcagaggccggcggaggccctatgggacgcagagaggccctgctgtgttgaggtcccagctgccattttgcctgccttcttgggctccaggatgttggcctcaggctccccgctgaccaaccctgtttggggttaagtgaacaccgctggacagacgtcaagtcatgagaaaaactccatcctgagagtcatcttaagcttcttgggatttcagtatgcccaattgattccagctggtgtcaaatcagcatattttgcctaattacattcatttttgcaggtggtcgccatcggtttcatttacaagaactcagagtagccccaagaaatgaactagatagctggcagagcagtccacagtggggaaaaagtctgtttttgtgaacactgaattgacatatgcttttccataaacccaggcttgcaaggagtcgtgctcatggcctccttgtctactttccatccctcagtctctctctctttttaaggcataaatgtgaaaagaaaacaaatctctcctctcctatcttccccggcccgactcagggatttgaacgctgctcattgctggcccagctgaaccagggggcccagaccttagcctcctttggaagactgccatgtaaatcagtggcctacaccaagttttctcagtaatgtgagtccttcctttccctaaaaatgggaaatggggcctccacaggtcatcaaaaatgtggcttaagcctggtgtggtggctcatgtctgtaatcccagcactttgggaggctgagtgggtggatcacctgaggtcaggagttcgagaccagcctggccaacatggtaaaaccccatctctactaaaaatacaaaattagttgggcatggtggcacatgtctgcaatcccagctacttgggaggctgaggcaggagaatcggttgaacctgggagatggaggttgcagtgagctgagatggcaccactgcactccagcctgggcgacagagtgagactccgtctcaaaaaaaaaaaaagaaaaaagaaaaaaaaagaaaaagaaaaaatgtggcataaaaacagaacatctggccagagatcattgtttaatggaatcctctccaagggttctctctcttgcagacccgtccagggcatttcagagagaagagcctcgaagcccagcccggagaggcagaccagaaacaactgaaagcaggccggggaagataggagaggagagatgtgttttcttttcgtatttaggccttaagatccagcccatgtcagcctatctcctccccaattgcgggagtcagacacatgtcccccggaacagaacaaggtgtgcagctggggaggagacgtgccactgtctagcttggggcccacctgccatgtagctcccaaataacatagtgaagtggttaaagggcacttgttctggagccaagtggacccaggtccaaatgacagctttctgactgactttcactcacttacctgggaccttaggcaagtgactggtagcactgaggtcctgcaacatgtgggcaaccctatctcccccgggggtgactgtgagatcagaggaaatgtgtgcaaagcactagcacagggtgaggctttggcacacagtgcactgggctggctgtgatacatggtagctggcacaaggtcaggtctcagactgctgcaagtattacagggcagtgagacattgtagccattgcagttatcatcaatattccctagctctgataattctctctcctcaccccaacctgtgggagtatagaaaatgggtactagcaggaaaaaaagcccagggtttggcaggattcaggccatttcagggctgtttatggacagaaacttctcagtctttggatcacggcaaggaaatttttttccaaatccttgggtagctcatttgtgaggcaacagcaccctctctggtcggaaagcagcattttctctagaattttctctgggggcttcagggcacctacacccaaaaagtgaacaggtgtgtaaatgagtgtggtgtggtctttatccaaggaggtcagggcaacctcagcatctcccccttatctgtgggcgactgcatccatttcttccccctcattcttcccagctttcattgcttctgaactgctgacagtggggacagtggggacagtggggagggaagtatctgtgtctgaggagcccgcagtaccccctctcaggcttagccacactggctgcctgctccagttccaccctcggggccagcacttactcggcatatccgagttttggtttgtcctggccttttacagtcctgggaactgtgactggacctccactcacactgacctctccccagcacccttctccaccaccactacagaaacttgcatgctatttggtttggaaaattccagaaggcccgactctcctgtgggtctgtgtcacccctgaccaagtcccagctctgaggtctcaggcaggccaagctgcctctctgagctcctagagcctcagccccggaggggcagtggtggggcattcacaaagtaatctgtggtcatacctggctccagcaagcccacaggctgtgcctgccatgccgacacgccccttcacactgccagcaagtggctgcgtggtcctgtctcgggggcttcccccacctgtggtccgggtgttgtcccattcagccttgtgacatctctgcgagctccccttctcgttgccaacctaccctgagagatgcagctcagagagaggagcgggcccagcctgctgggggtgtccctccagtctagagcgagactctcacccaggccccccatggcccaacagaaccctgggggcttccaggccccacacccgctgctcctcacgaccccttttctctgtctccatggaagcttggagatacaagttggagagaacaaaagctcgggggcccttcccggccactcccagcccggctccctgggcctccgcccgcgggctgacagcacagagaagcttcaggagcggttcagctttgctctcacctgctctcttgagcaatctgtgatggctgtcagagaaacgcctgctttaattagttcttcactgattactattaagtggcacgttatgtaattatcccagggcaggccccaaatggagtctatttcaagcagttacctgaattttgtgaatgaaaattatggtgattccatctcgactacaccacccggcacccaatcaacacatatagtggcaaacccaataaccctccaacgggcggtgaacaatgccatggctcctgcgtccaggctgcctggcagctcacgggatgctcacaatggccctgacaagtgtttgtctcacaggttggaaaactgaggttcagaaagagtgggtaatttgccaaagtcacacagctgggaagtcacacagctgggactggagctcaggcagtccagctccagagtcccagctcctaacctctatgcagtttagttagtgactacaactgctgtttatttagtggcttatgttgttagttaaccacagagatagatgatttgtacgcatcatctttcctaatcctcactaccaagtggaggtggtattatgcccatcgtacagatacagaaactgaggcacagaaagatctagctagctggaagtggcagagatggttttctatggcttgacaagcctcttagcacgtactcttagctaggaggcagtactgtggaaaggtttgcctttgtccagaaatagaaagtgtaagaccccatcagagctaatgctcattcagcacctgctccgtccaggcacttcccttggatcattcaatgcccacatcacctttgtgggattggtccaattattatcccccctttcacagatgaggaaactgagggtaagaggaactgggggaaagactttgtgaaggttccacagctggtgtgtagcagaaccaggacataaggttgctaaaaccacagcctaagctcttagctgtcactctatcagttaccaggattaatatcaccacacacggcctgacctctgtttaggaatgtgctttggccagaaaatgaattctaaattattgttccttcaggatgggcagtagggtactaagaacacactacttcttcactggcctttgctctgagaagagggatgtgctggacatgtagttgcctgggactggggcgctgggaggtgattggctcatggaactggtggtaagaaaacccaggatgtacatttttttttttttgaaacagagtctctctctgtcgcctaggctggagtgcagtggtgtgatcttggctcactgcaacctctgtctcctgggttcaagcaattctcctgcctcagcctcccgagtagcagggattacgggcaccccccaccatgcctggctaatgtttgtctttttagtagagatggggtttcaccgtgttggccaggctggtcttgaactcctgacttcaaatgatctaccctccttggcttcccaaagtgctagcattacaggtgtgaaccaccgcacccagcccaaaatgcaaattcttattgctttccccgagtctgctggcaatcctgtccttctttctagactcccatccttcatctttcatatcttaggtcctctgcctactcctccagcgacacctccccagaggacagaggcttttgcatttgtggagaaacccctctatttccttgtctgctcagcatctaggcacccttcactggtagcagcaacttattccacctcggggaagagcccacactcactctcagtccacatgactgccatggggtttacccttcctcctccctgacctagtgggtaagcatgtgactcagcctggccaatcagagtcacagtcatttggttagtgatgggcatgtgaccaaattcaggccagtgagatcaggtctgggaattttgctgagattattgggaaggttctccttttctcctgctgggatggcagtctggaactgcttttctgcaaggcctgagaaagaagctgtggttatagtcttcaagatgtcccctcatgagtctcacctcctagtattcatgtccttatgtagtcccctcccaccttggataaggctggcctgtgttaccatagaaggttgcaggaatgacggagtgtgactttcaggctagttcattaaagacttgcagcctttaccctgatgtcttggatctctctgtctgtctgggaaaaccctgtggccatgttgggaggtcactcaagcagctgtgtggcgatatccacatggaaaggaactggggcctcctgccaatagccatgggagtgagcccttttggaaacagattcctcagctccagcaaaatctttagataactgcaggcctggttactatcttgactacagtctcataagaaacctcaaaccactacaccacttctaaactcctgacccacaaacactgtgagataatacatgtttattgttgttttaggcagctcaattttgtggttatttgttgcaaagcattaggtagcaaatacagacacaaatacagaacacagcactgagaggtggagaatgaatgtcagattcctcatatttcaaccacctagatccagccatgcctcaagtcagcacgctttggtttgccggttacatgagccaaccattcctcctttggctcaagccagtgtggatttctttgcaactaaagagccctcgccaatacagaggttgtcacgaaaatgtgtgccccaggagccaagaaaaatctcaaccaccagatcccaggaagggcaggaaccacaggagaggacttgggggtggaggcagcaggtggtggaggccctttactctaatgtctgcctgaggacgccgcagcccttgctgcaggaccttcctcctcactcacagtctcaccccctttacactaatgtctgcctgaggatgccacagcccctgctgcaggacctccttcctcctcacacacagcctcacccggattcccatcttctccttgtccttctcctccctgactcacgcttcctgctttcttgttgttccagcttctttgtggcttcaccttcaccttcgccacaggctcccctacactcaggcttctccgggggttcagcctatagggaccctcagcaggagctcagccagggagaagagactgaggttggttgtttatccccctggtccccccaaataaggatctaagtgtcaatggcagccctctgctagccctcaggtcactggtgctgacatcagattccagtaagcattccttccttttgccccatctggcacgaaggtggtcatgtcctcccacctgatctgggcacacacaatttttctttccaattatataaataaaacatttgtaattttaaaaactctacagtttgcatgggggagggcagggactatagcaccaatcaggccgtggggacacagtgtcctctgacagcagcatcagggttcaggcaggccgggaggacatatcagagctggtggccttggacggggcagcagctcctccagcctgaggagtgccaccccctgtgtggccgtgctgcccagcaggccggctcccttccctctagggtgccagcagcagctcctactcctcacgagtccacttgatcatggtctccagtgagcgatagaggaagatgagcttggcagacagctcctcctccagctccagctcatgggtctcgcacgccaggaagatgtcctggcagagcttgaggatgtggtccctgcatggcagctcctccagtgtgatggagtgtgagatctcgctgaagaagctgcacatggacttgcccgtgaccagtgtgaccccctcggcccacacctttataaactgtccctgttctcaattcccctccattttcaccatctcctgcccatgccctggctgatacagtgatcgactgtcgttgtcatatctgttttgcaggggaggaagctaaggcacagagaagtgaagcaactatgcattgtcacacagcgagaaagtggcagagccagggtagccaggcagtgtgagtccagagcttttcagctgtgttccaaaggcaatgtagtgacaggctttgatccatggtttagaacaaaggctcgggttaaggtggggatgctgggctgcagggaaagaccctggcatctggaactaaaaggctgtggccatcatccaggtctgagatgaggcagtggggtgcaaaggaagagcagtggacaccacactggcagaacatggtggaggggtccgagatggggcctgggcttgtgatgtgggtgactcgggcgatggtgataccctccccttcgacgggaacagatatggaggtgctggtacagctcatggctctgagggctgggttttgagatgcacagagcatcttggagtcagccttggcttcagctcctgggaaacaggatgcagacccccctcaagctcatggactttcttcatccaccccctgaaagctggcagcatctgtggctcccatcgtggtcgtgggctgtgtctgatcctgaaggctgggcttcagcctgccctccacccccacacgcatctgacagcctattttgcgttaacaccgagatgcgtcaatgggaagctcaatgcaagcccctgctgggagccttaacagtttccagctaactaaccgtgcctcatgtacgtttaaaatagtttttgctattactgcaaggcccgcaaatcaatttcttagtcacagagtctgcttcatctcccagcacaggtgagttgaagcaggatgctcattaaaagaaacaacggggtgtaaacgcaagcgcagtggatgggagccccagggagggtgggtcggcgctgctggcaaatgttcaagatcaacctgagacacgtggtccccagggaggtgcagagtgcaccgtcccatacgcagagccggacaccgccccaggcccttctcctttgccatctccctgccttcccacactgccaaggtggcaagggcgcctgtgtccccatcctacagaaggaaacatggaggaattagaagtggagccactccagccaggcagcattttgaatattccttgagcacctactgtgtgcttggttccatgctagaagcttgggccacaacggggaaataagaccacagtgtcactgctcatggggcactggcatgcagatggggagacaatcaataccaaaacaaagaaggagacagcccagagtgttaatgctctggaaaaaaataacaaaacaagtcaatgtgatattaaaaatctctgggagggagcggggggtgcatgtcaaagacggtctgaggcccaagtccccagagtgagtgcctcacgagggtctgggaggagcctctcaggcagagggcaaagcacgtgcaaaggtgctgaggaaggaacaagctgaggcatgaacaggagggcacggcgggccaggctctgtgcaccgtgctgagggacgtgagtgaactgagtgtgctgagatggcacaagccagaggagaacagggtgctgcttttcaaagcccaggcatcttcaccactgtgggccaggttcctaggttccagggctcaaaacgtggacgtatcttttgggaggccactatccaccccccacaaaatggatatgaacatgtgtagagatgcagacactgatatggatatgggtgcagatagagatgtgcatacagatgtagctaaatgtacagtgacctcgtgacattgtaattgatgatgattgaagatttatcatgaatgataatgacaaaggcagccaaagatgccatctgggccagtcgtggtggctcatgtctgtaattccagcactttgggaggccaaggcaggaggatcacctgaggtcaggagtttgagaccaacctggacaacatagcaagaccccatctctacaaaaaagtaaaaaattagctgggcatggtggtgtgtgcctggactctcagctattcaggaggctaaggtgaggggattgtttgagtccaggagtttgaggctgcagtgagctaggattacaccactgcactccagcctggatgacagagcacgactgtctcaaaaaacaaaagaacaagccatcttcacagatcccatttcttatggaaactgatgcccaaagcagcctcaccacaagcatctttcccatggagccaaatcgagtgtgtcttctttgcccctaatccagagaagagtggttgtgttagcatccactgttgcctgttgcctccgaaggccaggcctggagatggccttctggttgagaaaggtcctggttttattttttgcagatggggaaacaagactgggagagatcaccattgatttcataaatgtttattgagtatctattacattcctggccctaaagatacaagagtaaatgagaaagatgaagtccctctccttgaagtaacttgttcaaggtcgcacagctaccaagggtctaggctgggatttgcattaggtcagcctaatctcagagccattgttctctctcctagggccacctggccatgatcagggacctctcaaaagccaggggatttttagcaagaaatctccaggcagggacatggcagttcacacctgtctgggattcagagtcccagagtcagcccgtgcaagactagtctcattgggaggggtgtgtcttccaccttgggagcttggccactcccagctcaggccccatttggtgtcccccacccccagcactagtggaggcacctggtcctccctctacctgaggaggtggcccttggactggctagtgtttgttgtctggcctctttattgcctcgtgatatggttacactctgtgtccccacccagatctcatcttgaattgtaatccccataatccccacatgtcaaggaagagagtaggtgaaggtaattgagtcatggggcagctttccccatgctgttctcatgatagtgagtgagttcttatgagatctgatggttttataaggggctcttcccccttcaacctgtacttctccttcctgctgccttgtgaagaaggtgccttgcttcccctttgccttctgccacgattgcaagtttcctgaggcttccccagccatgctgaactgtgagtcaattaaacctctttcccttataaattacctagtcttgggcagttctttatagcaggggaaaatggactaatacacccagagctggcctctgccatgaacccttcctgtgatcttccctctacaactattctggtatcatcttgtcctggaggtctctcctaacccatcaccgattgctcttgtgccaccctctgcagatccatgtctcagaccatcatctgggactgtccatctgtctccccttccagactgggagctcctcaagggccagctttaattgtacccaagtcccagtatctggccctggggcagatcaacagcaacaccttgtgacccctaggcatggccttgagaccagccaaaccagccacctgcagcttcttcacagaggccatgctccccatggcctctggaagtgcacaggatctctctgttctttccgtttcttagatgcatggttctgagcatgcatttacttttgtgactcctcagttaatgtctggcttcccaaaagccatgtaaatatcatgacaggtgcaatggtagcctagttcacatctatatccattgggccaaaggtagtgcctggcatacaatatgcatctgatatggcttggttctgtgtccccacccaaatcttgtgttgaattgtaattcccagtattggagggaggacctggtgggggtgattgaaacattgggagacttcccccttgctgttctcatgatagagttctcagaagatttggttgtttgaaagtgtgtagcctctccccctgtgctctcttgtgctctccctttctctctctctctctcctgccttgccctggccatgtgaagaccatgcctgcttcctcctcaccttctgccatgactgtcagtttcctgaggcctccccagaagcagaagcctatacagcccacagaactatgagccggttaaacctcttttctttataaagtacccagtttcaggtattcctttatagcagtgtgtggagggactaatacagcatccaataaatatctgttgcttggttgaacgaatgaaggaatgaaagaaaagatgacaccctggtgtcttagtggacctctgaatgaaggccagcttactccacaggggtctgtgctcaaaccatgtgggaatttcaaagaacaccttcttctgctgttccaaatccaccttctccagacctggaagaccctgggaccccagagccctggtgtgactgtctcagcctaggttgtccttagccctctacccctggctcttgtattaccccgctgactttatcttctggaactcaaccccacactgggcccagcatgatggccctgctcccttcctctgtctccctcctccttcttcctccttctgccccatctgacacagcccagggccttcaaggttcctatctgctttgccagcaaggcctgcccagcttcttctctgccactaaaggggtgctgggacccggtgtccccaagtctcccatcctctacagcccccacccacctgtgctttggcaggagatgagccttgagtgctcaaaagtcacatgtcccccaaatccccagggtttcaaggaagggaccttacagcctccctgtgccaaggccaacatctcacaagaatacccggttcccgaggccgaggctggggtcccaggagatgtgttgcagttttgttttttgtttttatttaacccataaatattccaatacatggcactaaaaaataagaaatctgccaaataagggtggtcacacatgttactattaacagctaaaatattaaaaattattaatatcatgaaatatccaatcagtatttaagttttgaattgttattttatctatatgtttgaaagaggatatataataggtctatacgttgccatggattcaccgaaatagatcaaaactcatccaatatgtttacatttaggagttcatagtgacactatcggtcactgctggaggatgtcagggaaccaacttatgattttgaaaagtgatcaatgaagagaaagaaggaggatttgacctgtcttccccatgaaggccatccgagcccctgcgctcctgactagtcagtcctcggagggggcgggagtgggttttggggacccgaggctgacaccctactccaagcagtcctggtcatcttcgcatggcttcatcaggctgtggtgcaccctgacctctgccctccaggggaggagaagaaatcttcctcctcagtcaatagggccgcccccgttctatcctcgcttatggattcatctctcagggcagctgcagaatttgcacgcccggggccacgtgaaaatgcctgcccccttcctcccaaagtatgaagattttgaagacaggacagcagagcattaaactaagcatgggctgtctgagcacagcaggctgcacaaccacgggggctgcccaccccgcacaacctgcaggcctcatctcctggggggtaaggactggcaacatcaagagaaaggaggggaaggggctgggatgaagaggctgcccaggcctattttacaggccacatgggaaggaagagaagccatctccagagacctcatgaagaaccaatcgccaaagccagaaaccagacaagagctaagagagcccagaaagaaaattcaaaaagccaacatcagagccgtaacctttcctctgtcaccaaagtgtctgctcttggccctggctggtgccaaaatgtcaccactcagagttgcagcttcagacccaagcggctggggctgcaggggcaggagggggcctgggtgccagcccagccctcaccaggtccccaagcccttcacaccagctgcaacagtgagaatgaggatgtttgtgacattgccagatgagatggtaactaacggccctgccaggccccagggatgcagggcaggctccatgcagcagatgttctgtgattacgaggaaattgaggcaggcggaggttcctgagtccagaggctctccacctctggcaggctgagcccagcctccttaaggatgcagctctgcttgcaccagggaaggggaatggggagggaagagggatgatcttgttgggagcaggcagtctacaaagagccccacgcatctgcttccaattcatgacaacctggctctattgttgttgtttattttccttaaatgaagttaatagttttaaaatttgccatatgttggcttcggttaagttctttgcagtggtttatgtaacccaagtgtgagggccaaggcctgcaagcccctggagttgactctgaccacctggcctgtgtcacaccctgaggtgcgtgtgtctgagggaagtgggtagggtccccataaaaaaaactgaggggccatttccaaggaacgaaaacacaggccagtgggcaatagtcccacccaaggacagaggagggcttgaagaaatgcagacggctgggccatcctggggctctcttggtcccagtgtagcctgggaatctgcattttaaaacctccccaggggattctaatgagcagtgagagaactgctgccccaccctacctctgagagaggctggaaggacaaagggcttacaaattctgctattatgctgataacagtaatagcaattattattattttcagtgagaaaactgcgggctcagggaagtcacctggtacagccaatctggatggagggccctggcttctgccatgccaaagcctgtgccttggaatctattttaacttagccaaagtaagaatatttgcatgatttctgttctagtccataatcagcagtcacttgatgttttttgtttttcaagcagtaggcagttcacagggctgaaagaattgggaggtgaattataaactttctgcttgaagtgttcccaaattccagactctggagcaatcgagggagcccttcacagctgaacaggaaaccctggcaatgggggcacagaggcaaagggcagggccctccttggcactgcagcagttagcctggggagaggctgagaggcaggcgcatgacagggcatggatctctcgggggtcacggccgagtgctcctggactgggaaaggacaagagggaagataccatgaccttcaacagggggcctgaggccacctgtaagttctttcataaagaacagccttgaacttctgcagggaggcagggaagggaaaatcaggcctcctggaggcaggaggagagggccccaggtcttggctgttggtactgccagtagctccccttcgtctctctgtctttctgtgttcccttgacacctgtcaccttgtgcctgtggcagagcatgcgtctgaatcagtgcgagggtttgttcaaacacagcgtgctggcctcgcccctgaggatctgatttaggagatctggggagggggagaacttgcatttccaacatgttcccaggtgaggtggatgctgctggtccaggggccacacctgaagcgcttctgtctcaattgatgttctcggcagttctctgagggcggaggaagagaccaaagcttagagctgagagctaacatgcctgaggccacacaactagcaactgacagatgcaggattcgaactcaagctcagagatcctggagcccactaaccacaaggtaccctcttctcactttaaactttccccctagacagtctgagtcagggcagcctctttggagacaggggctggaacttgactgcacattggagcccctgagaagcttctaaaatttccagtgctggggctgcctccagaccactgaaatctgagtccctggggtggcgcccaccaggttggcaggacttctttacgtttccaggtgatttcacggcacaggggctatatttgggactctgggcttcgggagatccagagtggccttagcagcaagtctggggtggggtgggtgctgcaggtggcaggcacctgcatggtcagctgcaccctggagggggccctgggtgacccaggaaagggtgactgtcctccctggaggcagtcggggagaggccttgactggggttgtcaggtaaaatacagagtatccaggtaaacttaaatttcaaatgaacagagaataatttctttagtatgccctaaatattacttgggacatacttaaaattaaaacaattatcttaaattccaactgaactgagcatcctggattgtatctgctcaatgtaggggcagaggtcccagcccccagcaccagcagctgaaggtgtattctcattcatttgatcaagcgttaggagccgtggtgtgtggcagggcagggagactggatctctgctcagcaggcccaggctgaggggcaggtgagatggaggcccagggaccctctgcaacctacagccccagctgttactcttgcatggtggagttccagccctgctgggcagatgtgtttctttccatttttctgtgaggactgcagccctgggtttacttggggaaagaggcctccgtgcgggaccgggggtggggattctaaacaatggggagagtagagagcgccctctccccagcaggctgttcgaaggccccatgcaaggcgcttggaccctcccctctaaatgccagcgccttccaatgcagcagccgctggtggtcgctgtggaggacagggccgggcctaccgggaggccattgatcaatggggccgctcccgttccatccttgcttccgggtgcagctctcgcctgttgcaagattacgcttctgcttgggttctttgtttgatttttattgactttgtcccttcttttgtgttgtggcatcaccttgtatcttccgttgctgcggtaacaagtcaccgtaaacttagccgtttcaaacaacagggccttgttatctcacagtgctgtagccaggagtccaggtgggcgcagggaggtcccagcctcgtgcctcacaaggttgagcgggcagtgtcggcggggcggagctgcttcctgtaggctctgaagcagaaccctgccccgctcacttggtggtcggctgaatccagttccttgggcttacagggctgaggttcccaatcctcgatggccgtgagccccggctgttctgcgctcctggggcctgccgcgtttctgcctgaactctccacactgcccctccagcaacagcaggtcaagccctcctcacgcttcgaatccctccgcctgcagctggagaatgttttctgcttttaagggctcatgggattagactgggccacccagataacccaggatcatcctttcttgtattgtcaagaaccctaatcacatctgcgaagtcccctgtgccactagtagggtaacacagtcatggttctggggattagggggtggcatcccgagggggccgttctgctcaccacaaaccgccctatatagcacagggtggccatccctagtgggctgctagatggatcttgccctgtgggcacactcctgccacgccaggctaggacgaaggtccctccaggccccagcagactccctgtgcgcctggccttggagtgcgtgtcccgcgtgtgtcctgtgccggttcccgccttgcctccttaccgacgcgcctcccttctggcctccaatccccacggcggcactgtggccgcaaacgggtccaccaggtaacctcgtggtttttcttttcaatgcacaagtaaaatgtctccccaccgtctcatcaatctgagggacaggagtaatcaacacagaactgtgctgcaggtaaggccggggtctgggccccaggatgcccgtttatccctagcccacactcagggctattgtgggataaaaagagaagggaactgaatgggggaggtgaagggaaggagaggagtctggtcggaggggcagaggttgatccctcctgacatggtgttaggggtgcactggggcctagaaagtgcccttgcaaatgcactgtgggacaggaacactctggggggtggtgtgtgttgggatgtgcaagtgtgcaggggtggggtgtgtccaggagtgccgggaagcagcagctgcagtgagggcccatttcctgcactgtcgtgttggagggggcacgggacagcccgcctgagctggctaccccagcgagttagtggaatcccttctttgattgtgtttgttggcttcacctgttcatgggctcctggctgagagaggacacacctaggatattcacaagccccagagcacttctgaacacctgtgagagatgctcaagggatgaatgcttgggcctttagggtaccttgagctggagatggggctgggggcagatgccataatggtcttctgctcccttctaggtacagccaattaatgacaacacttgttcctgcagaacagatccagcttcatgatcttttagaagagagttctaaaatcaaatcctttacctcccagcctgattactcttcagtcaacagaaacttaccaagcaccttttttgtgtgtgccaggcactgttccaggcactgggatagtgtgagatccctttctcccaccccacaccccacaggacagaggttcttgacccccacctacacatcagaatccaccaggaagctttacaaaattcccggagagattctgatgtcattgatcttgggggtacagcttgttaaaagctgcccagttgatttgaatgttcagctaaatttgaaactgctacaccccaggacatctgattaattacacccacagccttcaaacccagcccagttccacttaaaaagtttttcaaagatgcatagagcatgactgaggattctagataggaaaaggagaaattttaggctattaaagtgcctattacaattacactttaacatcgatatagagaagctttgtcattaaaacagttttttaaggttattgtgtgaatgagaacactaaaatcgaaaatttaaaaatacctgctgttccctgccatcctcctggaaaacttccaagcagccccaagtgtctgtaaagactcctttgtgaaatgtctattcagatgagccgccgggtccctattgtaaagccaaactgttcctgtttttcctgctgttgtcactgtcgctctggcccatgcaacaccaccccccgaccgacagggagggcaggagccacagcccgggcaactcctcgaggggagggatctttgttttgttcactgaggtagtcccaagacccactgcaggatgagcgcttggcaggtgttccttgtgagtgaagatctctaacagtcagcggatacagtaggtgtgctgcaccctcacacctcttgctcctgccagcattgctaatgaatcaatcacgaccatccttcccttaagcctggatgcagtcctgtagctctcaaccccacaatccagggaccagcaaaggcatcacacaaattcagatgatgtccttctatttccaacccacatccagtctgacctacagtcagaattctctcctcccttcctttcttcattcattcatccctccctcactaagggcacacagctagcaggccattagatcagcagtccccaacctttttggcaccagggaacagtctcctgaaagacaatttttccatagacagtgggaagtggggtaagggggatgcaggggtggttttgggatgaaacggctccacctcagatcatcaggcattagattctcataaggagtacacaacctagatcccttgtgtcacacgtgtcctgtgaagagacaaccaaacaggctttgtgtgagcaataaagcttttttaatcacctgggtgcaggcaggctgagtccgaaaagagagtcagcgaagggagataggggtggggccgttttataggatttgagtaggtagtggaaaattacagtcaaagagggttgttctctggtgggcaggggcggggcgggggcggggggtcacaaggtgctcagtggggggcttctgagccaggagaaggaatttcacaaggtagtgtcatcagttaaggcaggaactggccattttcacttcttctgtgattcttcactagcttcaggccatctggatgtatacgtgcagatcacaggggatatgatggcttagcttgggctcagaggcctgataacttgcacgtgcagttcacagcagtgttcacgcttccgtgagaatctaatgccactgctgatctaataggaggccgagcccaggcggtaatgctcactcatctccagctgtgtgtcccgtttcctaacccccacacggcctgggggttggggacccctgggttagatcacatacagctttgtagaccatctaaagacatttacttttacctgagtggtgtggagatacacaaagaccaaccaaaggagaacaagctaaggcaatttattcagagcttgctatagctaggggatcaccaccatcacattggtttggcagagactcaaaggcaggcaggggagtggagacaagggaaagcttcacgtgtgccctgattggaggctgtgcgcacaaggaagctgagacagctaactagaaggccatgcgtctcctgtgattgactagggatgcgtatttggctttctctggttggtcctaagttgcaactggggacagaaattagggaagctgtcggctattagtcaagtcctaaaatcagttggggactgattgttacctgggttattgtttgacttcctagattatctgctagagataatgattcgactttctacaagtctgacttgtatgtagtagcctggcttcctgcaccagttgccaccaattatgggccagagttttgtatttacatatggtcaggccatggtccatttgtatattcagtatctcagtgagatggagcaagagggttgtttttccttaaaatatgtattgaaatgtaattcacatatacaattcacccacctaaagtgtacaattcagggttttctagtatattcacagttgtgttgccatcatacaatttaattttagaacatttttatccttccccgaaagaaatcacatgtgttagagtcactcctgcctccctgctgtgccaggcctaagcaaccacgaatctaccttctgtctccatagatacttattctggacttttcgtatgaatggaatcataagcaaaagcttgattttccattgaaacagcagagcccttaactgccccctccctgcccatggacggtctctatccttgcctggaagtgccttatgacaaacagcttctgtttacagcgtccagttctctgagttgtaatgcatgtacccacctatgtaacaaataatgcacctataaccaccaccacagtcagaagaacaaacatttccatctcctccaaaatatttcctcttgcctttttgaggcagacaatgatacgctttttgtcactatagataaattttgttttttcttgatttttcacgcaagtggaattatatggacttttgatgtctgccttctttcaccctgaaaagtgttttttgagatccattcatgttttgagtgtatctgtaactggttagctttttattgctgagctgtgttctgtatggagatatgggtacttattcactcatctgttgatggtctggttttcaactatgaattcaatttcttagttgatataaacctcacctattgatctctactttcctttgtttccagtttgggctattataaataaagttgttgtgaacattcatgtgctttttttttttttttttttttttgagacggaatctcatcctgtcgcccaggctggagtgcagtggcacgatctcagctcgctgcaacctccgcctcccggattcacgccattctattgcttcagcctcctgagtagctggggccacaggcacccaccaccactcccggctaatttttttgtatttttagtagagacggggtttcaccgtgttagccaggatggtctcgatcccctgacctagtaatccacccacctcagcctcccaaaatgctgggatgacaggcgtgagccaccgtgcctggctgcttatcttttttgttgacttatgcttcatttttcttgtgacaacacttaaacgaagcctcatgaaaattaaaaacttattcattttttatttgtggtccgtgtattttggatcagatctaagacctatgctaaagaggtgataaagaaaagcttcagctgaattaaatttaaaatagtttaattgagcaatgaatgatttgtgaatcaggcacctccagaatcacagcagattcacacggactcccgcaggcaggtggtagaagaagatttatagacagaaaaagggaaatgacatccagaaatcggcactgaggtacagaaacagctgggttggttacaggttggcgtttgccttatttgaacacagtttgaacactcagcactctatgagtggttgaagtatggctgctgggattggccaagactcagttattgttacaggcacatactcctaatttaggttgtcaatcttgtctgactattaagctgggttacagttcacccacaaggactcaaatatagaaatccaaagtccttctcaggccatatttagtttgctttaacagaggtaaagatgttctccttggtttcttttatttatttattttgagacagggtctcgctctgtcatcacgcagctgcagcggtgcgatctcaactcactgcaacctctacctcctgagttcaagtgattctcatgtctcagcctcccaagtagctgggatccacagctgtgtgccaccaggcctggctaattttttttgtgtgtgtgtttttagtagagacagcgtttcaccaggttggccaggctggtcttgaactcctggctgcgagcaataaacccaccttggcctcccaaagtattgggattacaggcgagagccatcgcgcctggcccttggtttcttttagacacttggtaacattggcttttatatttaggtctatggtcaaatttgagtttatttctccatagattttatggtaaggggccaagtttccattttttttatatgaatattcagtttttccagctctgattttctaaaagattatccttccctatggaattccctttgttccttacaaaaaatcagttgaccatgtatgtaaggatctagttctgagctcacacttctagtcctttgatctatttgtctgtcttcattgcaataccgcattgtcttgattactgcctttcaaaaactggtgaagtcaggtagtttaagttcacccatttgttcttgtgtttcaaagttgttttgcctattctaggtcttttgtatttccacataaattttagacttagcttattacatttacaaaaagagtctgctgaggtttggattggggttgctttaaatctacagataaatatcaagtctttaatctattgtgaaaagaaaataaatctcaggaccccaaaatcactgagcccaagggaaaagtcaaggtgggaactgcctcccattctatacccaattaaaagttccagtagacttttttggtaaaaattagccatggtgatagatttatttattaggtactaaaactgatatagagcttttctctaaatatagtaaagcctctgattccctggagttttctaacatacaccaatcatgttacctttgtggtacggtttccaactatgaaagatagaaaagctacatacctccctcacagtttgcccacaaggaaattccttgtggaggaaagacagacagaactcagtcatccctctgctcaggtgagacaaatccatatctgattgtttcctttgccctgttgtttcactaagccagactaaggcataagtgactattcctaaatagtctaaattgtgcattcattcatttagtgcgttcactgcatacactaaattgtgcattcagcgaaagcttaatcagaaactcaaaggaatgcaaccggttgcatacctatgacctggaagccccctcctcacttcaagttgtcctgcctttgcggaccaaactgatgtacatcttatatatattgattgatggctcatgtttgcctaaaatgtataaaaccaagctgtgccctgatcaccttgggcacatgtatgtcatcagggcctcctgacactgtgtcttgggcacatcctaaccttggcaaaataaactttctgaattgattgagacctgtctcagatacttctaggtttacactatgagaaaggtctctctctctctgcacttattgaggcctttaaaaatttctctcaacaaggttttatagttttcaatgtattgatcttaaatccattctgttcaatttatcactattccatgctttttgatgctattgaaaatattttaaaatttcttttttcaatcgtttgctaatatatagaaatacaggtcaggtgtggtggcctatgcctataatcccagcactttgggaggccgaggcaggcagatcacgaggtcaggagttcaagaccagcctgaccaatatggtgaaaccccatctctactaaaaaatgcaaagattagctgggtgtggtggcgtgcgcctgtagtcccagctactcaggaggctgaggcaggagaattgcttgaacctgggaggcggaggttgcagtgagccaagatcacgccactgtactccagcctggatgatagagtgagactatttcaaaaaaaaaaaaaaaaaaacacagctaagaaatataactggttttgtatattgattcaaaccaatcccaatcaaagttccagtagattttttggtaaaaaatagccatggtgatagacttatttattagttactaaaactgatgtggagtttttctctaaatataatagagcctctgattctctggagtcttctaacatacaccaatcatgttacctttgtggtatggttttcaactatgaattcaatttcttagatgatataaaccgatctctattttcctttaatcagtgttggtaactttttgcctttcaagaaatgtcttcatttcatctaatttttcaaatttattgacatacaattgtttccacatttcctgaccgtctctttgatgtctatgatatctgcaatgctgtctctttttcattcctgatactggtaattggtgtgttatctttttcatgatcagtctacaaatagctaaagatttaccacctttattgatcttttcaaataactattttttggttaattggtttctctctttttttaggttttctatttttcttgatttccactgttattgttattatttctttccgtttacttactttgggtttaatttatttgttttagtaaaatgtacatgacataaaattcatcatgttaactatttttaagtgtgtagctctggtagtaagctgcatagctgtggcactaagtacatccatactagtgtgcggtcagccccaccatccacctccagaactttttcatcgtccccaactgaaacgctgtccccattaaacaataacttcccattttccctccccacaacccctggcaaccgccattctcctgagtctgactactttaggacttcatatgaatggaataatatagcatttgttcttttgtgacgggcttatttcacttagcctaacatcttcaaggttcatccatgtagcatgtgtcagagcttcctttcttatgaagtctgagtagataccacattgtgattattcattcattcagtgatggacacccgggttctttccacattttaactgtcatgaatgatgctgctatgaacatgggtgtgcaaatatctactcaagtccctgctttcacctcttttgggtatatatccaaaagtggaattgatagatcatatggtaacattctacgtttaatattttgaggactcaccgttcattttccacagcaacgacgccattttatatcctgccagcaatgcacaagcgttccaatttctctgcaatgcacaagtgttccaattgctccgcctcctcgctaatggttttctgttttgttgttgttgtttttataatagccgccccaacgggcgtgcagctgtctcattgtggtgggtttgatttaattttaatttttgtagcttctgagaagtagaagattaagatggtattcttcaccagagtactttgctactccattttactgaggttcaatttcaccaaagatttggaaaagtaatcctttgattaaaacaaatgattgtatcatttaatagtcacaaaccttaagtgtgttttacgggaatgcaagcacttcaaaaaattgcttaagtcaaactacttcaaggccacctcttctagtgttttaaagagctggttagcacagccacacaccacatggggaagttctggctgatggcggaccatgcatatgacgatggtgccataagattataatactgtatttccattgtaccttttctatgttgagctatgtctagatacacagattctcaccattgtctgacagttgcctaccctattcagtacagtcccatgttgtataggtttgtagcctcggagcaatgggctctaccatgcagcccaggtgtatagtaggctgtaccatctaggtttgtgtgaatatgctctacgatgctcacacaatgacaaaatgacctaacaatgcatttcgcagaatgtgtcctcatcatgaagcaatgcctgactgcaatgtcttatcagagctgatggttacattttcaggaatttcgtaagctacttgttaaccacagccattattaaaaattaaataacaaagttatagttaaattatatttaaaatgcaaataattacttaaaagtcatcacttcctaattagttaactacattttacagtgatctattctaattatctgtgcctactgtatcagcttggtgggaatcctgtgagacactgtgctcacctctccccaatgctggctgttttctttctttctttctttctttctttctttctttctttctttctttctttctttctttctttctttctttcttttctttctttctttttctttctttctctttctttctttctttctttttcttgctttcttgctttcttgcttttttttttttttttccagaatctcactctgccacccaggttggagtgcagtcgtgtcatctgggctcactgcgacctccgcctcccagttcaagcaattctgtctcagcctcccgagtagctgggactacaggcaaacaccactagacaaacgccaccacacccggctagttgtatttttagtagagacagggtttcatcatgttggtcaggctggtctcgaactcctgacctcaggtgatccacccacctcggcctcccaaaatgctgggattacaggcgtgagccactgcgcccggccaccaacgctgttttcggtagtgacatgtgaggatcttacaggcagctgtgcagggggctttacgctatggaaatcagtccttgatatatggttttgttgatcgtctagactttttgtgattttttcatcacaatagtgatggaaaatgttaagaatggagattaccttaaatgcatggtctatctgtggctgttgtattgcgaatggtatcaaaaagtttgaggaaatattcttccagcatttgaaaacttgtctaatttagcaagacagttgctcccatcattatcaaatgagtgaaattgagacatgtctttgttatttcacttttgtcttagtaattgacggatatgaaaatatcaaccaaatgttcaggttggaactataattgtttgtcaatgatacaagccagtttctttgctgaattggatatcattcaagcatttattcacagcgtgataatgtcactctattgttggtgatagaattttaagagctgataatggactttgcaagaaatagaaagttatgctgaagttataggtgtgtgaaacttacaatagagcattgtaagtcttattgtctatgggttctgtgctacacacccttcgtatcagtggtatgtagaccaagcacacatgtgtatgcatatgtgcgcatatttttattttctgaaaagccatctgttgacattcaccagcacgttaccaccccaaccccgccagggctcacaggaagtcctcagctttgagtgtctctgggaagggataggagaaaatgtggaaaaccacagccctgaggtttgtggcggccacgggggaacctgagcagctacaactgtgtttcgtaaacctgtgccaattgtacctgcaggaaactggttatttaggatggctagcacgtgagtccttagaggactcggcttaaaaaacaccgatttcagaatctaaagctgagactgcaaagggtttccattgtgaatgaacaccaacaacagaggttttctgcaacccttttaaaagatatgacgacggcaaaaaaaaaccccacagattaaatagctcgtggtcactccctccagaaaagcctacccatcctcaggggtccaagtggccggtgtgggcaacaccaaaccacgtggtttgcaataggcatgaggtcaacacaggctcaggaaaaggaggggggggcagcgcttcagattccatactgttcccagcattttcatcatcactcctctgctgcacccacccttccctgctccagcccacatatgcagcctccccctaaaccacccgggaaggacaatggccgcccttcctgtagatcagcctcagcttacagagggtccctgggatctaggctgaccactggtcccagtttgcctggtccttcaccggctttagcactgagtgccccaggtgtcgctgtgtttgttccttattgttgctgtaataaatgtagtggtttcaaacaacacagattcatcctcttgtagttctggacttcagaagtcctcaaatcaggcttaaatcttggtgtcagaggactgtatttcatctgaaagctttagaggataatttgcttccttgccttttctagtttctggaaatctcctggtttcctggggtctgggtctcttcctccatcttcaaagccagtgacctagcatcttccagtctctctctgactctggccctcctgctagctcttgcagggatccttgtgattataaactgaatcacaggataacctccccatctcaagaccattgactcaatcccatctgcaaagtcccttttgccatgtaaggtcacacattcataggttctggggattaggatgaggacatctaggggcgccaactgcaccccagaagcccctcagtcctgggcaaaccagcatggctggtcaccctgctagggtcctgaaggctcattaaagcatagcctagaagcaggatgcaaccctcatcctgctgtggccagttgacaagtacgccagaggctgggggggatgatttacatccaaacctggggaatgcctgtatctttccgccccagatagggccaggatgattcatctcaacccagtggtgtgcccttgtgaaaattaattaacctttttggaccacaatggcctctatcaaatgacagtaataaagcttcaccttgtgcgttggcgtgagatggagtgggagggggtgtgcagcccctcacgaggcatataaaggagcctcgataactgggagctcgtgttttaatcaaagccccattgtcacgggtttattcacatcctcttctcatttcaaagagggttccttgggctcacaatggctcatcagttagagtggcaggatcggaactgcagtttggaggaggaaagaaaaggacaggctgggaaatgaacaggaagtgagaacaggagcagggcccaggcggggctggtgcacaggacgtcacccccaggctgggatgcgcccggggctacaggatacacgctgggcccggagcctacacctgggccactgactcccagggatccgagtctgtgtgctgggccttatgtaaaaccacagggcaaaccagggcatctcttcattaaggatgaaaaacttatttatgaaaaacttatttatattaaaagatgcaacctttaggacattatactaagtgaaatatgccaatcacaaaaaaaccaagactgtatgaatccacttctacgatgtccctagaggagtcagttcagggacagaaagtggaatgggggttccaggggctggggagaaagtgggaagggggacttattaacatgttcaatggggacagactttcagttttgcaagatgaaacagttctgcagctggagggcggtgatttgtgcatggacttaacaccacagaagtgtacgtgtgacaattgttaaggtggccgatgttaactgaggagagctggtggccgtggtgccctcccaggtgattgcctctgtaatagtgctgctgtgctgtaagtagggtgaccaactcatcctggtctgcccaggacttccccagttccagttggaacatctcttgtcccaggacatcctcagtcctgggcaagcttggagggtggtcaccctgcttgtgaggcacatgcacgtgccgtcctctgatggggcagggctgcccctgaggcccagggttctcagccctgactgtgccagagaactcaccaggaagattctggaaacacaggtgctaatttagccccgaacctagggagcctgatttaatagctctgcagaagggcctgggctgctttttcactttaaaaaaatatgcttcttggctgggcgtagtggctcacacctgtaatcccagcactttgagaagccgaagcgggcggatcatgaggtcaagagatcgagaccattctggccaacatggtgaaaccccgtctctactaaaaatacaaaaacaaaaaaacccaaaaaattagatgggcattgtggtgctcgcctgtagacccagctacttgggaggctgaggcaggagaatcgcttgaacccgggaggtggaggttgtagtgagccgagatcatgccactgcactccagcctggcgaccaagtgagactgtctcaaaaaaaaaaaaaaaaaagcttctctgcagccagagaatcaatttcctaagtggaagtgtgggaaggagcggctgctgggccactgccctcggctcttgtcagatgtcaccagttgaccaccagtgtcttggatgaggctcgtggtctgccccatgtagggtagccctgggtgagatgggcctgtggggtgaagctggaagctggtgactaccctccaggccagtgtgttcacccatcctttggggctcactcacgtcccagacccaaggcagtgtgaatgcatcgcccagtcgcaggcatgttctcttccatctgggggatctggatgaggcctcagagtgagcagggaactggcatgaccctggtctgggattggtgggacaagtggcaattctctccttgtcgaggcctcctggacagaggtcactcacccacagggcactcagccatgtgtggagggcagaagccagcacagctggtgtgtcttcccattcaaaaatttggaaaagaaaaacactggttctctaactttgaaagaagcagcctcatatcggggaatgcagttttaaatctcatttttttttaagtgaagtagaaaataaaatacatgtatttcaatcccaggaaaatgcttaaccaatcttcacgtctccactaatacggcatctttctctaatgaataaaaaaaatatatctttgccaaaggaaaacgttacgattactttttatatgaacaaactagttgtacttaataaagacaatactatttgacaatttaacttttgaaaatttattaaccacacacgcacacatatatattttaaactatcagcatttactatgtgatttgttcacaaaagataaattcagcaaaagaatgaaaaagaaacagacaaaccccactggcaggcattcgccctgcactcgggacctgttgctgtgcctggctccgggccgctgtctctgcccatcttacaagactgtgcatggaccccctgaaaccccttgtaatccactagcagccactagaaggagacgccatcatttctgagcttcaccatggctgggagaagaagcacagcagctgctcggatgttgaataatttctggttctctttttttttgagacggagtcttgctctgttgcccaggctgcagtgcagtggcgtgatctgggcttattgcaacctctgcctcccgggttcaagtgattctcctgcctcagcctcccaagtagctgggattacaggcgtccatcaccacacatggctaatttttgtatttttagtagagacaggttggccaggctggtcttgaactcctgacctcaggtgatctgcccacatcggcctcccaaagtgctgggattacaggcatgaaccactgcacccgaccaatttctggttatctttaagaaaaaattaatattgttgttgtaattgtcttcttgctcctcagtcccaccaatttgctgtctccaccatatttcaggggctctgaaacgatagcccccattactttctccccttgagaagggctacctcttccctcaccaatggtcccatacctgattgcttgttggaagttcctgggatgctctgaggacatgctgctgactgggagtcaccgccagggatttggatgtcatcggatggggatgaacctgtgctcaagggtgatttgaaacctcaggcgagtctgatgattgaccgagtgtgagatacctgtgcctggacaaacatttgcacacatcagggctggttcatttgcacccccaaacactcagcctagttttgcctgttatttttaaactttatataaatgggatgtgtctgtttaggatgcagtcaacactgtgatgtcattcatagtgcgcctggtctgtagcaggggttggcagacctttttggtagagggccacatggcaaatgtttgaggctttgcgagccacctgtcatctctgctgcacagtttgctttctttcttttcttttctttttctttttttttttttacttttataatcctttaactatccttagtttgaaagctatgcaaaagcaggccccaggctgtagcatgtgttgacttcctgctctagttgattcattatcatggtatatttccattttatgaatatacaaatttattctactgttgaaggatattggggctgttggcagatttggctgttatgaaaaatgctgttatgggcagcatggagcatgtctcttgggatacagttgtgtgtgtctgctgggtacatacctagggatagaactgctggatcgtagggttatggtatctccacctttaggggataaggccacacagtctcctgacatgttcatagcaattcacactcccacctgtgtgtatcagaattccagttgctccacacccaactcgtggcctgccatatttccaatttcaatattgctaatgggtatataatgtttattatctcattctggttttcgttggcatttctctgatttcatttgcattaccatgtgatttgttcacaaaagataaattcagcaaaagaatgaaaaagaaacagacaaacccctctggcaggcattcgccctgcactcgggacctgttgctgtgcctggctccgggccgctgtctctgcccatcttacaagactgtgcatggaccccctgaaaccccttgtaatccactatactaataaggttaagtatatttacataagtgtattggctccttagagatcttttataaatcacctggtcaagtctctagcaaagcctccaccccttcttttcagcttgcttatttatttatttatttatttatttttagtagagatggggtttcacggtgttagccaggatagcctcgatctcctgacctcgtgatcggcccatctgggcctcccaaagtgctgggattacaggcgtgaaccaccgtgcccggctgctctgttaatttttaatcaatggtttatagtagtcatcgcacattttgagtgtgagcttgtcatcatttacatgtgttccaaatatcttctctcactctagacctcacgttgtaccctctcaatgcttcctgtgaatgatcagaagttcctaattcacgtagaaaactttatcaatctctttcttctctgcttagtgctttttgcatcctgacttttagaaaccctttcctactttaaggtcatgaagaatgtctcctatattagcttttagaaactttgttttagtttacagagtgtgtctcttggtgcacttgtccacacctttttgctggaattgatgttcgcctatggtgtgaagcagtgctggagatttgtttttctttttaatgtgaatatccaattgggatggcaccatttatggagaagaagatcattactggcagctttcagtatcactcttattataaatcatgtgtccatacatgtgtgggtttgtttctggtttctcttttttcttccgtggacccgtttatttctcacatcaatacgacactgtctgaattcctgcagccttatcattagtctcagggtccagcacagcagccctcctccatgattgttctttttcataaatgatttgaccattcatggctctctgcatgccatacactggagtcagcttgcccatgatcatgttactggagaaaaattgtctttatttctaccttttcttattccatattgatttactgtgtgtttgttccctggctagcacccccaggacagtgttgaacagaaatggtgataatttgggcattcttgtctcattcccaatgtcaaaaggaaagctttcaaatatttcatgcacaaatgcagtgattgctctaaacttgtttctgtgtgtgttcgtgtgtctgtgtgtgtgtgtgtgtgtgtgtccactctttattacataaagatttctttctattcttagttttctaaggatttttatgatgaccagatttttatttgcatcaaaagtttttctactttattgaaagaatcatgtgatttttccccccgaaaatgtggtgaagtctgtgaatttaattttcagatggtatgccagccttgtattcctggaataaaccaacaggtgtgtatgtaacacaactgcatttatttaaatggaacatttgtttgatttcatataaaacaagtttctcaaagaaatcctgccagcacagcagtgtatgtattgattaagagtcctggtttaggagatgcacttccggagttcaagccctggctctgtgtttcattagttctattttttaaagccataaggaagagtccttaacctcattgtgcctcagcctacccaccctggtaacatcaggataatagccgtatctatatcacaggaccgttgttagaatggaaagcaatcattcatgtaaaatgcataggcccgtgcttggacagtgtgagccccgtgcacaaccattagtgatgtctgtgtccttggaagaggcaccacttcatcctgcagccaagaccaccccaaggtttggcgatttgccagggatttgctagggatctactcagcatacagtgatactcacagctatgatttattacagcaaaaggatgcagagcacaatcagcaaagggaaaatgtgcatgaagtaaaagtctgggttttgttgggggctggtgctgtaggcatgctcttagcacataccaaatttccgagtcccaggaggaaagcaggtatccagcatataccatactgtttgcataaagaagttgggtgcagtgagccagtcttagcagttaatggtggggactcttctgaaatccaagtccccaggtaccagccaaaggcctaccttgcaagcaggcctttttaagcacagccgtgtaggcctgctgtgttgacttttccacacggtgtgatagtctcctttcatgtatcattggattcaggtcattgtgtctcctttcatgtatcattggattcaggtcattgtgtctcctttcatatatcatcggattcagattattgtgtctgtggttctggtatctctgttgctaagtgagattcagccatcttgaaggtctgtgtcaggctttagtgcccatgttacgctgacctcatcaaacacggcaggaaacagtcctttttaattctctccaaaggcgtaggcaatattggcattatttcctcttgctgaacttggtaaacttcattagtgatgccacctggggctaggattttctttttagaaagagtgtaggagtattcacatttttcattctttttgagtccgttttaataacatatgtgtatttaaaaaaattgttcattatcaaagtgttcaagcttcttagcagaaagtttttcataatatgctctcatctttttaatatctgtatgataaaaatgttctaatttttattcctgatattggatatttgtgctttctctctctctgattgatgcctgatgtctgctacttctctaggttttaattcacaatattttggtttttaaaatgtgatttaatagatttttttctgactttttacctctgctacttatcactggtatgactgtgggtagattacataaatgctttgggcctttctgatcactgttataaaataagggcagtgacttctacatgaggctcttgtgtcggatctatgagagaatgaatggaatgtacctaacgtgatgctgggtagaccttcaacaaaggcaagctgtaattgttttaaagctggctaaaggccgggcatggtggctcaagcctgtaatcccagcacttcgaaaggccgaggtgggtggatcacctgaggtcaggagtttgagaccagcctggccaacatgaaacgccatctctactaaaaatacaaaaattagccaggtgtggcagcgcatgcctgtagtcccagctactcagtggctgaggcagaattgtttgaacccgggaggcagaggttgcagtgagccaaggtcgcaccactgcactccagcctgggcaacaagagtgaaaccccgtctcaaaaaataaaaaataaaaaataaagctggctaaattggaatcataggaaaatatataatacagcaacagaacaaaaattagaggtggggataaaaaattaaaaatgaagcaaaggaaaaaaatagaaagtaccataaacagaaaccatgaatgagaaatacatacttgctagaagcgaccactgatttgcttataaactcattctcgtcaacctggagtttgtcctgtagggaaccccgggccgcgtgccaagggctgagaaagctgcaggatgaagtggtgcctcttccaaggacacagacatcactaatggttgtgcacggggctcacactgtccaagcacgggcctatgcattttacatgaatgattgcttttcattctaacaacggtcctgtgatatagatacggctattatcctgatgttaccagggtgggtaggctgaggcacaatgaggttaaggactcttccttatggctttaaaaaatagaactaatgaaacacagagccagggcttgaactccggaagtgcatctcctaaaccagggctcttaatcaatacatacactgctgtgctggcaggatttctttgagaaacttgttttatatgaaatcaaacaaatgttccatttaaataaatgcagttgtgttatttagtgggatacaagctctgaatgcattttgaagaaataacaaaaatgttgggacttcgcaccactccatggtgcgttccctctgcgcatcccagacttcccgcaggagctcggctttttccctgtgcctctgggacactgaggtggagaatgtggatggagaaagccgtccgttttctctcagtcattatggcacagtcggatccattccatcagcatttccccaacttgagccgattttcttttagagaaaaagaagctgcaaagagctctaagtctgtttgaggaccctgtaggctgaaaactgcggatttaaaaatctcaagttttagaggatgaaaatatctttcaattttatttcctttttatttatttatttattttgagacagaatctcgctctgtcacccaggctggagtgcagtggtgcaatctcggctcactgcaagctctgcctcccgggttcacaccattctcctgcctcagcctcccaagtagctgggactacaggcgtttgccaccacgcctagctaattttttttttttttttttttttttttggtatttttagcagagatagggtttcaccgtgttagccaagatggtctcgatctcctgaccttgtgttccacccgccttggcctcccaaagtgctaggattacagccatgagccactgcacccagcctcaattttaaattaataattcaacagagcagatttatctttcaacttgttacaaacaaaacaaaacaaaaacttttgaaaaattaccactgaaaagaacccagaaaaagagaaaacatatcatgaaacaaagctctggcctagatctcccacgcatccccatgggtctgcagtcaccaacaacactgggatggctgatgggttgtgttcttcaggataaagcaaaactattgcttaggagtatagccatgctgtccctagtcaaggctgcctttgttcacctttttagccggcaactctccagcgcccaatgcacagccctctctggaagtccgaatggattggatggcattgtctatctagagcgggatgtgggtcccagcacagccactccctccccatctccccaacccatctacccagcagacctgaaggaaaccccaccgactccattgtgttctccttgtagacagagcctgtttccctccccaactacacaaaggactcagatttccaccctggtctctgtctggcctgctggcgaaggtgtctggaccaagtgcaactcagccagccatgggagctcctggctatgaatggacctttctactgtccacttcctctcagagggcgatggacacccacagtgggtgttgttgggtgggctcaaccctcacaccatccctgccgatgatggtcccttatacacaggagctcctgtttcatcaaattgctgttgtgatgtgtttgttacattctctccctccattcagagacggactcagaggcttgcctcggacataaactcaaaagacagggtaagtgagaaagtgagacaacaggaatgaactcaagggtgaggaacccaggcagcttgggaggaggtgagagtacaaatcaccttctctcctccccgggtcctgtcatccctggtccctgccaaaggcgggtggacctcacactgggctctgagcctgtgctttccagagcgggggcccaattacccttggctcctggctgtggactgggataatataaagcccctggcacatcttctaccttgaaaacttagaaaataaaaaagaccattatttcataccccaaaagacatgcataaatagggagaaaaacatcaaattttaattaactttaaagctcaaggagaaaaaaaagtgatcgaaattgaatgctttcatcctatcactccaaactcagcagggtacatggggaccttctatttgttcaactctggaagaatttgatagaaaaattggtgaagacttgctgtagctcctctttcagctgttagaaacctaatcacatccatggccgggtgcgtggctcacgcctataatcccagcactttgggaggccgaggggagcagatcacctgaggtcaggggtttgagaccagcctggccaacatggtgaaaccccgtctccactaaaaatacaaaaaaattagccaggcatggtggtgtgcacctgtagtcccagctacttgggaggctgaggcacaagaattgcttgaaactgggaggcggaggttgcggtgagccgagatcacaccactgcactccagcctgggtgacagagcaagcaagactctatctaaaaaaaaaaaaaagaaacataatcacatccacaattcacagtgcaaagcaattacacggcagcacgactattctggacatttctggatgttagtatctttgctgttgatattctccttcttcttgttctcaaaccagctccatgctgctccatgccagcgccttgcccgccttcttccctcgctccctcccacattctatcctctgaaattccatgattctgccgttccctatgccagaggaggctgtctcattagaccagtggttctccaatctggccactcaggaacctcatgtggggtgtgtttgagaatatactcatgttgccagagatcctgacctaagtgaatggaatggggctgagcatcagattatttaaaggtctgcaggtggttctgaggtacagcctgttaaaaagctgctgtccaagacccatgtgtgtggaaggaatggctggtggacccgccacccctccaggaggtctctgtaccagaaggaagcgtcttagggtgaatgctgtactgcggcagctggtaccaccggggtcccgcgcactgtgggctgactcaccatgccccacccttgatgaattatttgccagttcagatatggtcatccatgaaccaaaatctggactaggcaaagtctaatacaaggctactgtctcctacactcaaatatccagagagtggtgtcttaagctctcatatgttaagtttggggaattggtcttcttccctctggaaatctagataagacacaaagtgagcattactctgaggataccttgccctgggaagtttggagattgatgatgtttctaatggctgagaaaagggcttggagattggggaccacggggacagacaggtctcatccaggcagctcctggggcatcactccaaccaggctctggctttcagggtccgagaaacccagcccagggcaagccctctccctgggggaaacagctcagagccctcagcaccaccatgcagaagcagtttttcttgctcctggggaagaggcctgggggctttcctctcaagtgcttaccctccacctggctacctccaaccaaacagcaattccctcctcattcagaaagtttagaactttctcccagcttctttgaatggcgctttctttgcatccatcctcttcaggccctccgctttcacatatgggctccccctttgtccgagtcctgtgttggggtacagatatacccacagatggcatgagccactgttcaaataatggaccatccaatctgtcgtgacactactgtgtgacagccctcagacaccgctgtgtgtacatgtctctagaagcacaggggtgaggccgcttctcacattttataggacaaggcacggagataggaaggcataaaaggagaattttaaaaaattacctgcactgagatcttgaacccccaagaacccagtgctccccaattgctgtgtccctcgacacagagagggtgagggatcatgacctgggaggtgcttgtggtatggggggatcgttgtgcacccctgctcacccaccagcctgggcagctgcagggacaccaggcctttggaggggactgccgtctccgaattcagcacgcgggtcgtggaggcctgcgtgtcctctgtgtacacgaatgctcttctcccgcaatcatttcctgacctcatttagacgggcgtgactcactctcctcaaaacacgcaatccccttcctcctctgggaactctggatctgccgggaagcgctgccaactggactctaaagaagaggagtggccaggtgcagtggctcacgcctgtaatcccagcactttaggaggccgaggcagatggatcacttgaggtcaggagttcgagaccagcctggccaacatggtgaaacccccgtctctactaaaaatacaaaaatcagctgggcgtggtggtgcatgcctgtaatcccagctgctcgggaggctgaggcaggagaatctcttgaacctgggaggtggagattgcagtgagctgagattgcgccactgcactccagcctgggcaacacagtgagactccctctccaaaaaaaaaaaaaaaaaagaagtgaccacttcccgacatcacatgggcctgtggtttagtctttgggttgaaatagtgcatcttcctcagtgtggatgatgatggctgcctctggcgttggaggcctgctgagttcctgcactgatcctgacctcctgctccacccacacagcagccctgtgtcccgtggtgcccaagaggggaccgagctcccacaccaaggcgctgcgctgggtggcagtgtcacggagtggacatgatccaaggacttaaaggaatactttgtatccacgtgcaaatacagctgtaatatttttgtagaataccaaattcaaatttatttttcttagggaaaagagtattccagaggaactggggtttacattcaggccacctcagtctctctccttttccctgcccatgatgtcctcacaggtggggtcccctcagtcccctctgacccaggaggtctttgggggcgatgtgcgaaggaacagtgttcagctttgtctcagcactaagagaaagggagatgatgaaaactagcccctggttacactgcgtgctcgccaagccccagggctgtcctcacactcgcttctcaacttggggtgattctgcccccctaggggacaactggcagcgtctggagacatttttggttatcacacaaggtgggcgcgcccctggcatctatcgagtggagatggggtgctgtgagacaccctgcagtgcacgaggtgacccccaccacagagggtcaccagcccaccctggcaatattgtcgaggctgaggagctcttcctgtggctgctgaaacgaccacacattgggtgcttgaaagcagcagagaagtactctcccttctagaaatctgaaatcaaggtctgaaatcaaggtccgtgcgccctctggtggcgccaggggagaagctgtccctggctgctccagcttctgccagctgccggttcctcaggggtgccgtcctcactccagtctccaggacccacatcttcaggtctgtctctgcttcagcttcaccctctcctctgtatgtgccaagtctccctctgcctccttcggataaggatacccatggccgcatcccggcccagggataatctttcctctttcagatcttaacttcatcccatctgcaaagttgctttttacctgtaagttcacatttacagtttccagagattagggcatgaatatcttttggtggggggtattgttattcagccaaccacacatatattgacaaaatccccacagcactctataaggtaagcgcctaataatggccccacattacagatgggataactgaggcacacacaggttaagtcacccactccgtgctggggctgggatggaacctgggctacgggatctggaattcaccctgagtttctgctcagctctgactgccttggtggacacagagtggcaatgcagctcctcaaactcaagcaacttcactttctcatggagacagcactcaaaccctcaggacagatgtgaagatcccagtgtgaaagactcggatttaagaatcgcgatcattaaatcaggaagatgtctttccattcggattttgcaggatgactgtgcttttatatttgttaagataatgtaaaacttctcattgatatgaatttttaaaaatatgtgacttgttgggaattttcctccggagtgctgtgcacactgtcttggatctgaaggtgggttagtttgccggagctgctgtaacaaagcaccatgaatgaggtggcatagaacagtggaaatccatggtcccacagtgccagaagctggcagtgtagaatcaaggtgtcggcatagttggcaccttccgaagcctcgaggaaggatccgttccagcttctccagcatctggtgtccccaggtgtcccctggcttgtggcagccatccccatgttcccatggcattctctctggatcggcacaatatcttctctccatgcatctaagtccaagtttcccccttttataaggaccccagtcatatggattaggggccttatctcaggtatgaccttatcttgcctaattgcaactgcaaaggttctatttccaaataaggtcactttctaaggtactcggggtttcagaacttcaatgtagaaatttggggggaccacaattcaactcattgcaacagaattctatattaaacattcttcagacaagttttactatgtctatataataaaagaaagtgttttaagagaggtgcaacttctctatgcttactacttttgtttttattaatattatcattacttgttgtttcatgtctgaacccctttggtcctgcaacagacccggctgccctggtgcctgtggcctcagccactgtcatcctcaagtcctggctgtgggtgaccatttagtacaggccattgaagcctgtgtccacatcctccagccacagatcctcaggaacacactcattgttgaatgaattgggtttattactcattgcggtgagggaaatgcttgctatagagaaccacagggcttctcggtaaaagggtgctattaaaacctactacatcagttatttgcctggggatggggaagtaggggctttcagggttggcatgtgagatgggagaaagtgtccttcagatctctgctccagatataatctgacctggggtcagaccatgctggatcaatgacgtgggacagctgcatgaccactcatcaattaattaaactttctgaccacaatgtgctcaatcaagtaagaataggccgggcccggtggctcttgcccgtaatcccagcacttttggaggccaaggtgggcagatcacctgaggtcaggagttcgagaccagcctggctaaaatggtgaaaccccagctctactaaaaatacaaaaattagctgggcatggtggcaggtgcctgtaatcccagctacttgggaggctgaggcaggaggatcacttgaacctgggaggcagaggttgcagtgagctgactgtgccattgcactccagcgtgggcaacaagagtgaaactctgtctcaaaaaaaaaatgagaattttagcatgtaccttgcaggactgagtgggagagagcatgtgaagtgcccacaatggccccccaattaatgggagctcctatttaatcagatcaccactgttgagtatgtattcatacaccttctagtctccatgagactttcatgggtcgcagtgacacacagaacagagcagagcaacagaaaagtgcatgtgttgggacgtgaaatgggcaggggtgaagctggagcatggaccgcctgccctctgacctgggcacatgcagaagggctgcctcttgggttcaagccctggatgaaggttgctcaccctcaggggtccttgtccatgtgctggaactatgtgaagtttaagggcagaactggtgtttcctatatcttacaattagaccattaaacatgtcatcattttactcatcacaaatatgtctaacttagggaaactaaaatataaggattttgaaagataaagcaatataattcaaaggcatttaggcaatggaccaaatcccttaatcttaagagcctgacttctgcagggacccggagcatctcttccaataaaggtgatagacaaagaactggaaaagttgggctgtcatctttgtagcatctaccagagagaaatacagttgcttcccatgactgacaattgtctctgagttaaaaacaaagtgattgtccagcagcaaaaccatccctgtttatatttttattggtaatgttgctactattttgatttcctcttcagttcaactgaattgggcaccattccctgcttgtccacactttacaattagccaggcagtctttaaaaatatccaataccaagaagctctcttcctgcttaggctgtagaaagtcacaagagattgttgctcccaccttaacctgaataatctatgaaattataagtgttttgagcccatctgaaagcggaggctacaaggcaacctagggaagtagattccaggaagtgacaagcccctctgaagacagagtacatacacactgtcttaccttgggcacagatggaaggaataggtgatcaccctaaaagtgctaggggaaaacaggtgaaattgtagcaactcttaaaggctgctgacacaggctagcatgacagtttggaacacccgggaagcctagactcaaggggttccacaccctcttgttagctcttttccctggatctctgctagatgctgctgagaaagatcaagagcagggcaggaaacagagccttatgaggggctgcaagaacaaagcccaactgtttctccaactctcctctctcatgacactatagcctcaagatgcagaagagctggaaagctccctactcactcttctaaagcaaagatctattgccttgaggggagaggggagtgtggaaaatagatcaatggaacatttccaactgaaacacaaagaagaaattaaaaaaaaaacaaaaaacataaaagagcattcaagaactccaagacaataaccaatgatctaaaatatctgtaactggagtccaggaaagggaagacagagagaacaaggaagaagatatatttagaaacttctcagcaatgacctcttcagcattaataaaatacaacaaactgcaaatcccaaaaagccagagaacacaaagcaggatatatgcaaaagaaaatacaccttgatgtatcacagtcaagcttataagaagtgaagataaagagatcttaaagacatccagagaatgaagaacattacatacagaaggacaaagatatcaattacaacagacttctcatcagaagctatgtgagcccaagacaatggaacaatatttttaatactgaaagaaagaaaaacccctatcagtgtagaattctacattcagtgaaaatatctttcaataatgaaaatgaaatagactttttcagagaaatgaaagcttaggaaaaatgtgacctgtgtactgcactgaagaaatattcatgttctatgttcttcaagaagaaggaaaatgatatgagttggaaatttgtatctacacaaacaaaataaatgatacagtaaacatataagatacctccaaaaggtatggaaaagtagaaaatatttgactgtctaaagcaaaaatagtaaaaatattgtgtggcctataacatacatacaaataaagtttagaacaaaggaaaggcagcacaaaaaatgggagggaatgtacatacaatgtggtaaggctcttaccctatctgggaagtggtataacattatttgaaggtaggcaatggtaagttaaaaatgtatattataaaccctagggtaaccactacaaattgaaacagtgaggtgtaattgattacttcaaataggacattttttaaaagataagagacataaatctaaccacattgataatacattaagtgacaataacctaaatactccaattaaaaggcaaaaagcaagactcaactattttctctctacaagaaatttactttagctatagaactgttaaaagtaaaaggatgaaaaaagacctaccgtgagaacattactcaaaagaaagcaggactgactatattaacatcaagcagtgtagatttcagaacaaagaacatcaggaacaaaaagggacatggcaaatgttaaaggaggcaattcattgagaagatgtaacaatcctaaatctgtatacaccaaataaaagagcttccaattacataaggcaaacattgaaagaactgaaaggagaaatggacaaaaccaaaatgttttgagtcgagtaaaggcaaatccaaccacgtggctgatgcacgctgtccctgccacccgtttctgtctcaactctctcctccacaacctagagtttccaccagcccagggccccatgtgacatcaagggattatgtcaagttttggaagaaaacgagggcagctttctgcaggataataataatagcagatatttctggtgtccttgcactgtgccagctattattatgtcctttgcttgaatttcctcatttcatcttcaaaacaatcctgtgtgttcaatcctatttaccacagttttacagatgacgagactgcagcaccaagaagttaaggaatgagcccaaattgccaggaagacagaggagcttaactgctggacagggctacactgcccttcttttttttttttttttttttttgagacggagtctcactctgtcgcccaggctggagtgcagtggcgcgatctcggctcactgcaagctccgcctcccgggttcatgccattctcctgcctcagcctccccagtagctgggactacaggtgcccgccaacatgcccggttaattttttgtatttttagtagagataggctctcaccgtgttagccaggatggtctcgatctcctgacctcgtgatccgcctgcctcggcctcccaaagtgctgggattacaggcgtgagccaccgtgcccggcaatgcccttttttttgtgaaaatatacagaaaggtgatattttcaatgttaaatgcataaatgttaaaataaatgtatcatttcgtagaatacaaatctgatggcatttttaagaaaaattatgaacatcctcttaggagaaagcaagaaatctaggaacaccaaggatcctgtcttgctcacctcaggctccctgagagaagatgcagccttctgggccttcaggaagatttctggagcaaagtgtgagggattcaaagcaattccaatgataaactctaaagttctagtgtcaaaagtcgtctttcaattgtgattttacattgcaatggagttttacattttacattgcaatataagttttaaacattttcttgtggaatggctacatggtgcatttcccagggtctgcagactcctatgaagaaatactgagatacgtggccaggcacagtggctcacacctgtaatcccagtgctttgggaagccgagatgggcggattgcttgagcccaggagttccagactagactgggcaacatggcgaaactccacctctacaaaaaataaaaataaaatattgagataagagattcaagtaagataagattgtttgcttattggaaaataagcaaacaaatgtttagaagcacaaactccccacatcagcatccttacttttattgtatatggctgctgttgttttctctatttgtcccaggtcactcccttgctctgcctggtcctaatgggcaggacagtgtctgtccacttagagcagaggctgttgatgtgacatccttccaccgttctctcctttttggccctcatcagtgatatgatcaatcatcatcttcccacccactgggcggagtcctgccctccaagcttgcactccctatttgtcctccaaagctagatgatgctcttctattcccatgctcctatctggtatgatctgatcaaacatttcatagcacaggtgtgtgatttgtataaattaatgaacctttccagacctctgtgtcttttatcaaataagagaaacactcctattattcaagatctaacaggagcgcgagaagacttcctgcagtccctggcacataatagcccccgtacaaatgcaagctcatgtttaatcaaatcacctttttttttttttttttgcgtgtttcaggctcactcttcattcaaagagggttcagagacacacagtagcacataaattagaacagcacaacagagatttggaaagagtgagaaaggagagacaaagggaatgaaaaccagggtcaggttttccatgaaatggaccggaggtgaggctggggtacagaacgtccaccgtgcagccccgagcactagccagaggggctgggctgcctgggctccaagatcctgccttggacactgtgcacacgtccaagcatgtccccggggttcttggccacattctgggcttatgtaaagttacaagacagacctgatgcaccttatacctcaaagctcctaaacttaaaaatgtagcctggcgtggtggctcatgcctgtaatcccagcattttgggaggctgaggctggcggatcacgaggtcaggagatcgagaccatcctggcgagcaccatgaaaccccgtctctagtgaaaatacaaaaaaaaattagtcgggcatggtggcaggcgcctatagtcccagctactcaggaggctgaggcagcagaatggcatgaacccagggggtggagcttgtagtgagcggagatcacgtcactgcactccagcctaggtgacagagcgagactccgtctcaaaaaaatatatatatacatgaataaatatcttctatatctgtatatcagtttttgtattcaaagtagcaggcatataatagggagtaaaatattagtgccccttacaacttaaggcacaagaagaacaattctaagaaacctaattcctgcaccccaaccttgatcctgtgaaccaggcctctgagagttcctggtagttttcctctgtcccccttagaaggtctctggagggacttgggggaattctatggtgaccatgcttcttgggggtatgctgactggaggagtcagtgcctagaagtgaacacaactggtgggaagcgttccccttcctgtttatttctgtaccagcttgtcacctctgttattgtgcccctcttctccttctcatccactccacagttttgatgccattttgtgccctaaccctcaccacccccggctgtgttccagcctctaggagacaatcaatggttctttcctctagaaaataataatgcaaccatggtggtgtgtctgaattatatggtatgtgcaggaggtgcttttaaaatatgttgatacttagaacccttccctagcgattcttatttaattgtgctggtgttaactggtatagacttttaaaaaaatcaacccgattgattctattttatagcttgggtcaagaaatactatcccagagcaaaatagacacaataagcagcttgtataccacctccctcttgcaagacagacatctctaatcaatcactgtgcttggcagaattctaagatgagccccatgatctctgtcccttggtgttataccttgaataatctccttcccttcagtctgtggagaactggtgacttgcttctggtcaacagaacatggcaaaggtgatgcgctgtcattcccttcataaggttacgttattttcaggcgggaaagagactccccagctggccttgaagaagcaagcagccatgttgtgagctgcttcccaagcaagtcacagggcagagagctgcaggcacctctagggacctgagggctgaccacctgtaagcaactggagtcctcagccgcacaaccaaagggacataaattctgctgatcatcatgtcagtgagcctggaagtggattcttccctagttgagtctccagttgagaactcagcccagtgaggccttggttgcatgccagtgagaccctaagcaaagaacccaatgaagttgtgcccagacccctgacccatggaatctgtgagataataaatgagtgttgttttaagctgttagatttgtggcaatttgttatacagcatactatatggatacagtaatgaacgtcatcacctaggacaggaggaggccctgcagtctttagcactccagtccaagaagctatgaccactagctaaatgtggcctctgagatgaaatctgttgaaatttgtattagtttcccattgttgctataacaaattactgcaaactgagtggcttaaacaatacgcatgtattatcttacaattctggaggtcagaagcttgaaatgggcctcaaagggctgaaatcaatgttggccgagctgtagtcctttctggaggccctagaggagaacctattttcttgctttttccagctcctggaggctcctcacagtcctaggctcatggccccttcctccatcctcaaagctggcaatggcaggccatgtctccctcaaaccacatcacatcactctgacattgctgcctcttctgtctctctcttcacttttgaagacccttgtgactggctacattgacccaactgataatccaggatacttctcctgtcttaaggcttaattaattcccctttgctatgtaactgaacatactcaaggatttcagagattaggacacggacttttggggtgccttctgcagcaccccaaccctgaataaagaatgtactcatcatccccctttcactgcataacccctgcccccagagggcttggcctgcagctttatgcctgttgtcctggcataatcattagcagcgcctcacttctccaaaatgtctataaactgtatagtccaccctttttgagtactagaagttctcaatatagccaatgattccttaatgacatcaatatccagttaatgctgcattcctctgatggttccaagtgatttttttaattttcaaatcaggacccaaataagctttcatcccaatttgttgatatgtttctacagtctcttaatctgtaatcaataatccctttcaatatgttgtgaacaaaagttctctgaaaaagaatttggaggaaagagactttatcttagtgaatagtttgcaaaccagggagtcacaaccttccgggtaaaatgaaagatgctttacagagaacaaagggagggttggcttttatagagaaagttctcaatcaggtccatttatgtaaaagaaggattcaaactagcttagttctgattcgtcaacacagctgagttctgattggccaatataactgagctctcattggtcaagccaggtgggctctgattagttggctggggttagctctgaaagtcacaaagtaaaacagaggtgtgggttttgggggaacttggagtacacgtgtggcctctactgagcaaatgactgcctggctctattttaaatgtaggcccagttagccactcaagatcctcttgaaggactggctctttcaggttcacatttgttcacacttgattttaacaaaatcagatcatttgtccagaaagtttcccacatctggactttgctaaccacacactgtgtggttttgtgtttgtttgtttgtttgtttttgagatggagtttccctcttgttgcccaggctggagtgcaatggtgtgatcttggctcactgcaacctccacctcccaggttcaagcgattctcctgcctcagcctcccaagtagctgggattacaggtgcccaccgccacacctggcttttttttgtgcgtgtgtatttttagtaggacagggtttcaccatgttggccaggctggtctcgaactcctgacctcaagtgatccccccaccttggcctcccaaagtgctgggattacaggcgtgagccactatgcccggtgccctcccatgtggtttttaaacacacactttccttctcttcctcttcctctgttttttttttttttttttttttttttaaataaagtctcactgtgttgcccaggctggagtgcagtggcacgatcctggctcactgcagcctccgcctcccaggttccagcaattctcctgcctcggcctcccgagtagctgggattacaggcatgcaccactatgcccagctaatttttgtatttttaatagagatgggatttcaccatgttggccaggctggtctcgaactcctgacctcaggtgatccacctgcctcggcctctcaaagtgctgggattacaggtgtaagccactgtgcccggctgacttttaaacacattcttctgttctctgtatttccatatttcctgtaaatggatagctatgcccagaggctagattatgttcaagtttgattagttttttttttttttggaagtggggaaacaaaagtacttcctaggaggagtgatctacacccatcgggagcatatcctgcctgtctctccttttctgatgtttggagccatatacagctactgcctaaatctgttaacttaatcaggggtcacaacatagcaatattttaattctatcaattcttcacttattacttggagctataatgcttttataaagatacatttttcttcactgtttggttatcatgtggtatagtttgtataagaaaagcaggaagatgattgaacctttttttttttaaatcaatttccaaaatattgagttggatccttaaaacatgatcaatgaggttttttttagtaaaattatggttttttaatttaaacattgtatgtgtgtctccattcatggcagttatcactgttagtggttgcttaccttagcctgtctttggtgggatttatccaagttgacacctgggtctctcagataccaccttagtaggctttgataatgtcctcacttcctgttatgataaaatgctccaagattatctggaacatttcttgcctgagacaaataatcagttatttctctaaggaatcctggttccttttagagaaaaatgaagtagcgaccacaatctatgtgctgggagtatgcattgctactgcagtggtcattgtttctaggccttgtcagaggataaaactaggaaatatatatatatatatatatgataaaatatatcctgagtttatactgatcctttataattagattcagaattcttgggacttactgaacctcattgatctcacgtctgcatcttcttcctcctactctaaagacttcagcggccagtggcaaagtaattatcccattgctttctcctgcaatctacccaagacactgccacaatggaacacagcattaccagcaaaatcagtgtcactaaaatcagtttaggtttttttttcatgttctttttgatttaacttactaggaacatacagtcaaatatctgtgttttaaagtcaaccgggagagtccctatgtctggctattctaccaacgatacagtgttaagtttagttgtttcagcttgactgcaattattagggattgcttttaaaaaatgtatataatttcattactatttatgaattaatcttatataattagaactgattttacataattatgtcaaaatatttgcatggctctagagtcatgtttactgacaggatataccctgagcagtccggctcccattcctgccccttctacactggtccttgactctttctgcaagtagatatattttaaacatttttggtttattcttccttttaaaaagataggacgggtgcggtggctcacgcctgtaatcccagcactttgggaggccgaggcgggtggatcacgaggtcaggagatcgagaccatcctggctaacatggtgaaaccccatctctactaaaaatacaaaaaaattagctgggtgtggtggcaggcacctgtagtcccagctattcaggaggctgaggcaggcgaatggcgtgaacccgggaggtggagcttgcagtgagccaagattgtgccactgcactccagcctgggagacagagtgagactccatctcaaagataggcaagtgtgtttctgtcttagtctgttcagcctgctatcacagaatatcgtagactaggtggcttataaacaacagaaatgtatttctcagagtactgagctgggaagtctgaggtcaaggcactggcagactcagggtctgatgagggccacttcctcattcatagatggctgtcttgtcacgtggtgaaaggggcaagagagctctctggtgtctcttttccaagggcactaattccattcatgagggatctgccctcttggcctcatcatctcccacctccaaatacaatcacattggagattaggttttaaatagaaagtttagagcggcacaaacttcaatgtgtagcaacacgtgcgcgcacacacacacacacacacacatatttatatcccaccttcttagataaatagaatgtcatatggccgggtgtggtggctcatgcctgtaatctcagcactttgggaggccgaggcaggtggatcacctgaggtcaggagttcaagacaagcctgaccaacttggtgaaacactgtctctactaaaagtacaaaaattagctgggtgtggtggtgcatgcctgtaatcccagctactcgggaggctgaggcaggagaatcccttgaactcaggaggcggaggttacagtgagccgaaatcataccattgttctccagcctgggcaacaagagtaaaactcagtctcaaaaaaaaaaaaaataccatacatactttctcccacttggcatttttcaatgaataacactggagtcactccatagctatatgtaaaaacactcattcctttttctgctgaatgatcctccattgtgtgggtgtaccatagtatattcaaccagtcccctcttcatgggcatttaaattgtttccaggtattgccaaaaaaagaaagctgcagcgattagccttatacaaatacctttttatatttttgcccatgaatctttagaatgaactcttagaagtgggattgttcggttaaaggataaaatgaatataccattttttctttaaaaaaatgtcggcagggtgcagtggctcacacctgtaagcccagcactttgggaggccaaggcaggaggatcacttgaagccaggagttcaagaccagcctgggcaacatagggaaaccctgtctctacaaatataataaaaaattagtggagcgtgaggatatgtacctgtagtaccagctactcaggaggctgaggtgagaggatcacttgggcccaggaggttgaggctgcagtgagccatgattgtgctactgcattccagcctgggtgacagagcaagatgctgtctcaaaaaaaaaaaaaaaatagaaatgctttctcattctatttttctttcccaccagtgatgtataggaatgtctgtttcacagtgttttcaacagagaatgaagtccaacttttggatatgagacaaatggactaaagagaaatggtatattaattttaatcaggatttctcttcttctgaacaagcttgggccacattgtttattgagggccatttgcaatttttggtgcctattcttaagctccttctgttgtataaccatcatccttctcccctgcatatactatttcacccccagtgcagacctgtcatctaggtgttgggatgactcacatgctggattcgggtagttgcttccttgggctgcaacttaaaccttccctgtgtattctgcagcttgtagagatatgtagatcagaagtttattagaggcaactcactttggttttgttttttgttttttaaagtctgaggcacagcaatagcatttatttaattcatattattctataggtaattttaatgacatttttcagtggctcacacctgtaatcccagcactttgggaggctgaggcgggcagatcacgaggtcaggagatcgagaccatcctggctaacacagtgaaaccccgtctctactaaaaatacaaaaaaattagccgggcatggtggtaggtgcctgtagtcccagctacttgggaggctgaggcaggagaatggcgtgaacccgggaagcggagtttgctgtgagtcgagatcttgccactgcactccagcctgggtgacagaatgagactccgtctcaaaaaaaaaaaaaaaaaaagaaagttgtcattcataaatcttgaagtgtgaagaactaattgtccctaatcattaaatattagtgattattaccagatctatttattttttaattaaatttttttttatttccataggttattggggaaaaggtggtgtttggttacataagtaagttctttagtggcgatgtgtgagattttggtgcacccatcgccccagcagtatacactgcaccctgcaccctatttgtagtctttaatccctcacccccttcccaccctttccccctgagtcctccaagtccactgtgtcattcttaagcctttgcatcctgatagcctagcgcctacttaggagtgagaacatataatagttggttttccatccctgagttacttcacatagaataacagtctccagtcttatcaaggtctctgtgaatgccattcgttcgttcctttcgatagctgagtagtattccattatatatatatatatatatatgtgtttctttatccacttgttgattgataggcatttgtgttggttacacgtttttgcaattgcaaattgtgctgctataaacatgcgtgtgcgagtatcttttttggataatgacttgttttcctctgggtagatggccagcagtgggattgctggatcaaatggtagatctacttttagttctttaaggaacctccgcattgttttccatagtggttgtgctagtttactttcccaccagcggcgtagaagtgttccctgttcaccgcatccatgccactttgtagggcatctttcctaggtgggctttgccccacagggcgtgtggctacgtcatttcaccttcagtgatgctgaacatgagcagttggttcgcacattggtggcctgggcctgatggagccagtgtcatggtcccaccaacatttcacttccacaattgagcatccattgataactctcacctagatctgtcattctctttgaaatcattagccagcattctctcttaccaccaatttggttaccctgagattttcatataggaaagtccagataaatatcttattctttcttgttatttatcatttttcagaataatgcaatgaaggatagtatttagagggtaaaatctgggtgttaggtgtgtgctcactttaaaatactgccaagttgtatttttctaaagcattttagtagacagagaatgaagaaaatatcaaaaaatatcaatttaacctcataatattttttaaaatatttctatatttaaaatattgatatgttgatattaattgatattttcaagttcaactgtaagattataaggtattcctcaatttctttaacattttcacttcttttctctttaggctgaaaatcttggttcctaacaacattaatataatcacttgcttgatcctgtaactgtttcaaaataaccatgccaatcataactcattttaaaatttttaggtgttttcctttttagaatacgtcctattaggcatagctcacaaaaactgtgtttttaaagtcagttgaacccgtgatactttccatgtggtgatgctaccaccagtctgatagaattttagattcatttgtttctttttgttttcaaatttcagattgcttttctactacccatatttaatattgctttgtagttatacaaaaacatgtacatggttccaaaaccaacgttatataaaaattacattcagagaagtttgcatcctccctgtgtcctccactccaatccatcgctctgccacaattcgccatttactagattttggctggtctttccactgcttattttcatgatgcaagggactaagtaaatccatttatatttctcttttgcatgattccttttatatttttccagtatttctttggagagagtcttagaagtaagatcaattggcaaagaataaatgcgcatggaattttccggtgagttgccaagttccactctattagggatttgcattctcaccagacggataaaagactgactgtttctacacagtgtgcaatccaagtactgagattttttcaatttaataagtggccattttaagttgtatttctcatattattaataaagatgagcatgtttccatacaattgagggccatttacatttcttttcttgtggattctttgtttatatcttttgcttgatttgaaaaatttgatttttgctcgaattcttctttgcttatggctgttttctgtataatacaaatataatgattttgacattgttccatgttttatatattaacattttctttatttttatagctgagtagatttggacatgccacaatttgtttgcttgctagtggttggagatttgaattgcttccaatttggggctattaggaataattctgaacacaagtaattcatatacccttgtaagtgtgtgtgtgtgtgtctacgtaagtcttcatttctcctgggtaagcacctagcagtagaatcacggggtgggtgactaatccatgtctgactgtaaaaggtgatcaatgaatgaatgactgtataaggtgatcaatgcctgtttgactgtacaagatactgccatgctatttccaagggactacaccattttgcattctcatcaacaatgtaatggatctattattaattttcatagagtaacacaaacatatttgcgaattaagttttgatttcccacacagtataatatctctatctgtctacactgaataagcacatatgtatctcctgcataaaccaaagcttttttcaatcctcaacacatttgaagagtgcaaagtggtcacaagaccccactattaggaacttctctttcagagcagcatttagagatggaaggtgtctgttttctagcagccgcgaggggtacccatgatcacttctgcgtttctctaactgagcaaagttcattttaaaggacacaaatcctcaaagacccccagaacacgtcccaggacaccacttgaaaagcaccaattcaagaatataaaattctggactataaaaatctctttcagtggtgcattagcactgctacagtgcgattttgtcattagatgctaaagctgttttattggttttttttgttggtttttttgtttgttttgttttgagatggagtttcgctcttgttgcccaggctggagtgtaatggtgcaatctcagctcactgcaacctctgcctcccgggttcaagcaattctcctgcctcagcctcccaagtagctggaattacaggcatgcaccaccacacccagctaattttttatttttgttttctgatagagatggggtttcaccatgttggtcagactggtctctaagtcctgacctcaggtgatttgcccgtcttggcctcccaaagcactgggattgcaggcgtgagccaccactcctggcctaaagctgttttttattgttgctgttttatatttttcatcacaaactgcaaaagtaaaaattttctactgcccctcctatccccaatattcccccatgtccccaatggatgtgaaaatgcaaattacagaaatgcaaacttgcacaattcagcatccctaaggtaaaaacagactaattgttctggagcaacacagcctgtccatacttgctgcaggtcacagccctcaaccctgctgtgtggcaggcagcccctcctgcactaggagaggctgggagacctctatctgcagcccatgcattagtcatccaggactccacctggacgagggcagttcctgagctgtgcagcctgggccctccctgtgcgcctgtgctcttgcaaatggagagggtggctctgcctgcagcacgggtaccatccaaggccagggccagggccagagtgcacagtggggagtcctcaaagcaggtgaggacctgaagtatatgggctgcagggcaggcaaaccccgaaactggggcttagcctgaaaaggtctggctttacccaggaaagaattcagggctgagctggaggcgtagtgctaagctctgtgactgctcctacacagcaggtctacccaccaggcagtgtgtggaaagcagcagctgtggggcagtggtgccgccatatttatacccacttttaattacatgcaaagtaaggggcgggttatttagaaatttctagaaaaagggtgataacgtccaagtgttgccatggcaacggtaaactgtcattgtgctggtgggcgagtctcatgcaaatgagcttttgcctgttccatgtttcagccagtcttcactctggttgggagtcaagtcccgcctcctatatcgcattcatactcagcagctttaggcgctgagttggatagagggcgacagaagctcagagcagcacacacactagggcagaggtgcagagaggtgcggtgcagaggggctgggtggtgggtgagggggatctgggcaggaagttgttcccgccaggctagagcgcaggtcacccagggtcccggctccacccgggtgggcgctgcaggctctgagccgtggctcagtccgagggtcactcacccacctcaggggaactggacgagccccaggtgacaggaagctctgtgcacacctggtgcctggccaacctgtaacatttgaacatttcaatatccatttctatttttttaaaacaagcatcaccttctgtcagccattaatatagaatcactatggagcgatgactacataacatttccacgacttttggaaagttcccatgagtttggaaagagccacccaaggaatctcctctcccgagtttgcagcccgcgccttctgccgggcgtttggcgcatttcttccagagaatacggatccgaattattccagaggagcctcggccgcagtctctccagccgccgccagagggaaacctgatcccatgcaggattcctaggggctcccagagaagccctaggctgtgctgctgcctgctggttctgggaatgggtgagccttgggagagcaaagagaatagaaagtaattctccatgtgtcttcctccagctccaatctagtttaaaaccatccccctatagcctgctttttttccttaaagaatcttcaagcaaatcccagactttgtatggcttcacttgtaaataattaagtatatctcccctcaagaaaagacttcttacatactttacgtaaacaacttttccatcctcaaacctcacaaaattgccgtcaatcccctgctatcatatgatgaccagttttcagcttttacggcttcttggagatctcgtaaatgcctcctggcaaccgatttgctcaaactcatttccagacaagaccggttaccaaaacaccagggatccctctaggacctgatgctcagggcacaggaagccaatcgctgagaccatgggtattgccagggaagaaggcttgaagcaggtgctataggcaaggagatgggcgctcagtctcaagtccatcttcccgacagactaaaattagggttttatattgtagggaagaaatgtaacaatgtgtgggaaaacaggaactcggaaggagcccggaagcaatcatgataaatgaggggcctggcagcatctcctcctatggacatggtgatctggcgagtttcagttcttaatactttttgagaggcctggagtcctttactgaggaaggaactcagataaaacaaatgtaagtttcaagctttaagaccagaagggtcaatttctatgtgtgtatttatatatatctgtctatgggccgggcgcggtggctcaggcctgtaatcccagcactttgggaggctgagacgtgcggatcacgaggtcaggagatcgagactatcctggctaacacggtgaaaccccatctctactaaaaaaaatacaaaaaattagccaggcttggtggcaggcacctgtagtcccagttactcgggaggtcgaggtaggagaatggtgtgaacccgggaggcagagcttgcagtgagctgagatcatgccatagcactccagcctgggcgacagagcgagactccgtctcaaaaacaaacaaacaaaaaactgtctgtgggactactgggttgccttcagacctatacatttatgtttgttggataatatatttctaaagagttttttacgtacggggttccttccttcctttgttttctttctttcttttttctttttttttgacagagtcttcctgtgttccttgggctcccaggctggtgtgtggtgatgtgatctcagcttgctgcaacctccacttcccaggctcaagtgatccttccaccataacctccccaatagctgggactacaggcgcacaccaacatgcatggctaattttagtagtttttgtagagacaggggttaaccatgttgcccaggctggtcttgaactcctgggctcaagggatccgctcacctcagcctcccaaactgctggaattacaggcatgggccacctcgccttgccccttcctttcttcattgctgtttgtttgctcatttgttagctgttggggtttttgtgttattttgttttcagtatgacatttatttggtgaggacatttcacacttacgttagagggcacctggctgtgagataaccgccccaacacccctgtattcctgggaactggtcctcatcagcgccaggttgggtcctctgggaaagcctgcagatggatcaggggtgcattcctgttgctccacccagaggcaggagggtcaggctgtgtctctctgggctgctgtgattgtcagtgcagtcggatccttcatcatctgttcaccgtccatgttgctgctcatggggtgagcagccattcatgaacattgccaagttccttccttcctttcacaagaaattgcaaaatggtgacgttctatttgtaccattccttcagtatttgtaagccagattcttctatttataataacaggaagaacgtttcctcatcaatatttggtttttctggtatatggtttggataggaaaggcgggatcaatgcttttcattccttcaagctgcatcataaaaaggtggtgttcgagcattttgaaagccctttttaaaattacaaactcacattcttttctaaaattgatgtgtttcagtcacctgccaccgtcattcttctggatggtccatgccctcactcaggccaggggagcctctccaggtcagctcctgcaccctcaggccagcaccccagaggtagagagtgtccttgcctcctggtcgacaagatgctcctggcttagcttatgcatttactgccccagagtggaatcagccctttcttccaggagacctggtccagatctgtgggttcagtgagggtggaatagagacagtgaggcacccccagcccgaagcacctggcagagaacagactgctacaaacagatgatcatacattaatcaaattgccgtcgttacacactcactcaaactccttcctgcacagaaaaggcttcagagcctcaccatggtccctgaatttcagcagcagaacagagatttgcagtgggtgagacagggaaggcacagagggtgaaacaagaatctgggcaggaaggggtcccaggtgtgaggctgctgcgtggcctgccagctccagtcccaggccctcttgtgggtccctgagtcccagtacctctgactgggctgtcaccaccagggcccttggctgggtgctggccacctgtgaggccacggatgaaccttgggctctcctcacttgtagtaggaaaataattggaacaccactgttcttcccaatacccaaatccacatccatacagttgagaagaaaacttccatttctaagggtgaagtaaaggaccgtggatagatgttggattgcaccatacagggggctgccctcctcttcctttgcagcatcctcactagcctcccgcattctcagtgggattgtgtctcaatgttggagagctctggaggacattttgtccagcaagcgccaagggaaaatataatttagggaattatcaatgcccatgagaatcatgaaagataagcaacagtgctgcccaggacagccacaattcctgctggattgtgactgtaattgacattcttatcacaggtctccatcacagctagctgtcatcactggcattgtcctgctgtgttctagaatctacacaatgcatctgccttgcccctcaagccctcattctaccctaaagctcaccatccaacaaccagcatctgtgtgaggccaatgctcagccaaatccacaggctgtgcagtctcagcctccagagctctgcccagggcactgtccagcagccccagacacctcagccccaggtgcatctgagccctccctcacgctcatcacacagcaacaccaagccacctccaacctctctccccagagcccttgggaagactcatgaccttccaagttgcactgcaagggattagagtggcatcttaatgaacccttttgctctcttgcacctagacacctagatgtaattttacactccagggcttgtctccctggaaacacaggtgtgattgaggcaagagccagctcagggcagggagtgccagagaaactcacacacaggtgtttcagcactgacccaaggctcagtcctggcctctcaaattgctgtctgtccctctggtggttaccagaagaattgcagggcttctgcttttacacccgaggctcttaaagggagaagaacctgcagcaggttccctgaagggctgtgcaggggaccagagaggcttggctggcagaatattgatggtgcaagccccttgatcactgacggtgccccttgtaaatgcataaaaatgatgaagcatttgtgttttgccttgggctcaattctcagcttttgttttaatataaaagcaatcaatttctccctgaaatctagtaaaatgtcctaggaaaatgtatgatttttatgtgagagctgcactaacacccagccctcagctcaggaccctgtgatgacagaggctggcctggaaaggatacagctgggctgggagcaggtgtttgcccacctgagcccttgtcccacttccagatcctgcctgattttccctgttagaatggctatgatcaaaaagacataagaaaagagttgatgatgatatggcaaaaatggaacccttggactctgctagtgagagtgtcaattggtatagctattatggaaaatatgaattttcctcaaaaaattaaaaccagaactaccatattattcagcaatcctccttctggtatatatccaaaggaaatgaagtcacaatgtgaaagagatatctgcactcccatgttcattgcaacattattcacaacagccaacacatgaaaagaacctatgtgtttacccactgatgagtggatcaaggaaatgcggtagacatatatgacatggaatactattcaaactcaatagagacatcctgacctttacaataacatggatgaacttagaagacattatactaagtgaaataagccaggcaaaggaagaaaaatactgcgcattcttccttatatgtggaatgtaaaaatgctgaagtcgggctgggcgtggtggctcacacctgtaatcccagcacgttcagaggccgaggcggttggatcacgaggtcaagagatcgagaccatcctggccaacatggtgaaaccctgtctctactaaaaatacaaagaaattagccaggcatggtggcaggcgcctatagtcccagctactcgggaggctgaggcaggagaatcacttgaacctgggaggcggaggttgcggtgagccgagatggcgccactgcactccagcctggtgagagagcgagactctgtcaaaaaaaaaaaaaaatgctgaagtcatagaagcagagagtagaatggtggtagccaggggcagggttgagggcaatggggagatgttagtcaaaggatacaaacctttaaacaggagaattaatatctggagatctgtcacacagcatagtgactactgttgataaaatgtaatgcatacttaaaattgccaagacagcagatcttcagatcaccacacacaaaaataagtatgcaagctgatggatgtgttaattagcctaatttaatcatcacataatgtgtacacatatcaatacaccaccaatacatacgatttctatttgtcaaccaaaccttcataaggctgaatacaaaaggaaagtggggccaggtgtggtggctcatgtacgttgggagactgaggagggcagatcatctgaggtcaggagtttgagaccagcctggccaacatggttaaaccttgtttctacaaaaaatacaaaaatttggccaggcgcggtggctcatgcctgtaatcccagcactttgggaggccgaggcagggggatcacgaggtcaggagattgagaccatcctagttaacacagtgaaaccctgcctctactgaaaatacaaaaagttagccgggcctggtggcatgcacctgtagtcccagctacgtgggaggctgaggcaggagaaacacttcaactcaggaggcagaggttgcagtgagctgagatcgcgtcactgcactccagcctgggtgacagagcgagactccatgtcaaaaaaaaaaaaaaaaattagctgggcatggtggcgggtgcctgtaatcctagctacttgagaaactgaggcaggagaatcacttgaacctggaaggcggagtttgcatgcagtgagctgagaccgcaccattgcactccagcctgggcaacaagcgtgaaagtccatatgaaaaaaaaaaaaaaaaggagagagagagagagagaaagaaagaaagggaaagaaagcaggctgggtgtggtggctcacacctgtaaccccagctttgggaggccaaggtgggtagatcacttgaggccaggagtttaagatcagcccagccaacatggcgaaaccccgtctccactaaaaatacaaaaaaaattagccaggcctggtggcatacgcctgtaatctcagctactcgggaggctgaggcatgaaaattacttgagcctggggggtggaggttgcagtaagctgagattgtgccactgcactccagcctggttaacagagggagactctgtctaaaaaaaaaaaaaagataaagtgggcttgggttagttgtaaatgtatactgaaaactctagggcaaccactttttaaaagttaaattaagaagtataactgatatgctaagacatgagggagaatgaaataatattaaatgataaaatcataaatggctgaaaaggggtggaagacacaatagaaacaaaacacaagggctacaaatagaaaaccgtaacaaatatggaagaatttaatctatctctataaataatcatttgaacatcaatggtctaaatgcaccaagtaaaagcctgggattttcagagtggatcaaaaaataagacccaactatatgttgtctccaagagacccaccttaaaaataaagaggcatataagttgaaagtaaatgcatggagaaacatataccatactaatgctaatccaaacaaactagaagtagctatgttaatttcagatggagttgacttcaaagcaaggaaatgtattagggatatagaagagcattgtataatactaagaggtcaattctgcaagaagacataatttttaaagtgtatgtgctgaaaatagtgtgtcaaattacataaggcaaaaagggatagaactgtaaggagaaatagatgaatcaattgttttagttggagacctcaacacccctctattggaaatagacagaaccagcaggcagaaaatcagaaaggatatagttgaactcaataccactgtctacactgcctaaaactgccatctatagactacttcaaccacagcagaatacaaatgctcctcaagttcatatgaaacattcaccaagattggctacgttctgggatggtaaaatttaccttaaggtatataaaggaatagaaatcatgtaatgtctgctctcagatcttaattaaactaaaaccaatgacagaaagataactggaaaatatcaaaatttacagagattaagcaacacacttctaaacaatacatgggtcaaaagaaacatctgaagaaaaacttaatattttgaaagaagttaaaatgagaacacaacttatgaaaatgtgtgggattcagtgaaagcagtgattaaagggaaatatataaaattgaatgtgtttattagaaaaaagaaaggtctaggctgggcatggtggctcacgcctgtaatgccagcactttgggaggccaaggcaggtggatcacgaggtcaggagatcgagaccatcctggctaacacggtgaaaccctgtctactaaaaatacaaaaaagtagccgagcgtggcagcgggcgtctgtagtcccagctacttgggaggctgaagcaggagaatcgcttgaatctgggaggtggagcttgcagtgagccgagatcacgccactgcactccagcctggttatgaagtgagactccatctgaaaaaaaaaaaaagaaagaaaaagaaaaaagaaaggtctaaaaccagttatcaaaggttccaccttaggaagctagaaaaagaagagcaaattaaatctaaagtaagtagaagaaaaggtctaataaaaattagagcagaaatcaataaaattggaaacaggaagtcaacagaatcaatgaaaccaaacaccaattatttgtaaggatcaataaaattaataagcctctggccagtgtaactaagaaaaaaatagggaggacaaatgagtaatatcagaaatgaaagtgggaacatcctaagtgcccatagatattaaaaggataatcaaggcatccaatgaataactctatgcctacaaacttaaaacctggatgaaatacaccaattacttgaaaagaaaatatgccaagactctcacaagaaacagacaattggaataagtttatatctattaaagaaattgagtaaatagtaactttccaaaacagaaagcagcaggctgagataaattcactggtgaattctaccaaacatttagagaagaaattataccaattctccacagtttcttccagaagatagaagggggagataatatttcctaagtcattctatgaagccaacaacactctaaaaccaagaccagacatgataagaaaactacagaccaccatctcttgtgaacatggatgtaaacattttcacaaaaatcagcaaattgaatccaacatgtataaaaataattttataccatgaccaagggggatttatgccaaatacacaaggctggtttggtattaggaaatcaattgatgtaatccattacataatgaaggttaaaaaaaaaaaagaaaaaatcacatgattctatcaatagatgcagacaatgtatttgacaaaatccaatttatgattaaaaaactcgcagtaaactaggaatataggaaaacttcctcaactcgataaatgtatctataaaaaaacccgacagctaacatcacctataataatgagaaacttgaaaccttccctctaggatctggaacatggcatggatgccctctctcaacatgccttatcaatattgcactggaagtcataaagaatacaataagagaagaaaaaatgtgtactgattgataaggaagaaataagactgtttgcagatgacttgattgtctatatagaaaattcaaaagactcaacataaagttttctggaactaataagtgatcctagcaaggttgtaggatgcgaggttaacatacagaagtcaatcattttccttcacagtggcactgaacaagtggaatctgaaattaaaaacacaatactgtgtttattagcaccccgcaaaatgacatatctaggtgtaaatctaaatggaatctcagtgccacagttatttttctgtttagaaaaaaagtgttatgaaggaaaatgatgtatgccccaactacagtggatggtgaaagacgcaaggtgaggaggaaaaagcaaacaagttgaggaaaaccagttatcatttttaattttaaatatcatacccacccatttctaccattcctgagtcggtcaacatttctgtaatttgaaaaacataggcctgggtgtgatttcatctgtctttggcatttatcctacctggtgctctctgagcttcttggatctatggtttcatgtctgacattaatttggggaaatccacagttataactgtttccaatgtttcttctgttcctttttctacttcttccccttttgggattcccaggaggcatttacgagatctccaagaagctgtaaaagctgaaaactgtcgtcatatgatagcagggtattgacggcaattttgtgaggtgtgaggatggtacagttgttacttaatgtattgaagaagcactttctggaggggagtcatattgaattatttgcaagcgaagccatgcaaagtctgggatttgcttgaagatactttaggaaaaaaagcaggctatagggggatggttttaaaccagattggccaaatgctgagcactgttggagctggagggggacgcatggaggatcacttttctctctgttttcccaaggctcacccattcccagaaccagcaggcagtgcttgctctgggagccccctaggaatcgcgcacgggatcaggtttccctctagcggcggctggagagactgcggccgaggcgctgtaataatttggatccgtattctctggaagaaatgcgcccgatgtccggccgaaggcgcgggctgcggacgagggagagggtagtctttggtggctctttccagactcgtggaaactttccaaaagtcatggaaattttacatattcatcgctccatagtgattctatattaatggctgacagggggatgcttgttttaaaaagatagaaatggatattgaaatgttcagatgttccaggtaaaccatgcaccaggtgtacactaagcctcctgtcgcctgggtccagcccagtcccccaaagtgggtgagtgaccctcggactgagccggggctcggagcctgcaacgcccacccgggtggagccgggactatgggcgaccatcgctccagcctggcagggggttgcttcctgcccagacccccctcacccacgtccagccctgttgctggacacacgtgctctagtttatgtgccattttgatcctttgttgccctctgtgagaagaaaggagcctggacaagcgtctaaagcttctgggtgtgaatagatacccacgcacttcaggccttacctgagtccaggtcgcctcgctatgcacgccctggccctctcccaggatggcgcccgcgctgcaggcagagccaccgtctccatctgcgagagcgcacaggtgcgcagggagggcccaggctacacagctcaggagctgtcctcatccaggtggggtccagcctggggtccgcccagtcggggatgagctcatggactgcaggtggaggtcccagggcccctcctagagtcctccctccacggagggtctgcctgctgagggtcagaactgagggctgtggcctttatctggtgtagacaggctgtgttgctgcagagcaatcagtctgttttgatcttatggatactgaattgcacaactcagcatttctgtaatttgcattttcacacccactggggacagcgagagtgctggggatgggaagggtgtggaaaaatttcacttttgcagcttttgatgaaaaaggtaaaacaatcagcattaacaacagctttagcagcctaatgacaaaaccctgctatttcaatgctaatgcaccattaaaatagattgtcatagtccagaattttatattcttagcttgatgtgtttcaatgagtaggctgggacatgttcagggggtctttgtggatttgtgtctttaaaaatgaactctgttcagagaaacgcagaagagatcagggcttcccccttgtggctgctagaaaacagacaccttccatttctaaatgctgctctgaaacaggggggtctaatagtggggtcttgtgaccgctttgctctcttcaaatgtgttgaggatccacaaaagctttggtttatgcagcaggtacatatgtgcttatatgctgcagatagatagtgcttatacatatgtgcttatatactgtagatattatattatgttggaaatcaaaacttaatttccagatatgtttgtattactcttcgaaaattaataatagacccattacattgctgatgagaatgcaaaatggtgcagtcccttggaaatagcgcagcagcaccttatacagccagacatgaattgattgccttatacagtcagacaggcatcgatcaccttttacagtcagacatgcactggtcacccacccagtgggtgatccagtgggatctacagctactgatatggaaggggggcagggcagtgctgggaatggaagggcatggtccctggctagagctccacccctgggtctgtgctcccagacctaggtgaggacgggcactcctgccttcacgctcaaatgttgcatttcccaaaatcaccctggcccattacacccccatactgtgcctataaaaaccccaagaccctagcaagcagacacacaagtagctggaaatcaagaggaacacattggtggcagaacacacaagtggctggacgtcgaggggagcatgtggcagaagagcacgctgacagacgtgggcaggctggcagggcatccacccgtggaatgatgtggagtttggccagggtggtcagaggagagcccaggccgctgagtggcccaactccaggggaaaaccacacccttctgtctcccccatctgctgggagctgcttccactcagtaaaactttgcactcattctccaagcccacgcgtcctccgattcttctggtacaccaaggcaagaaccccaggatacagaaagccctctgttcttgcgataaggcagagggaactgagctaacacaagccacctacaggtggctaaactaaaagagcaccctgtaacatacgcccactggggcttcagctgtaaacattcacccctagacagtgttgtggggtcggaccccacagcctgcggtctgcatgttccccctagaggtctgagcagcggggcactgaagaagccagccacacccccatggcccgccctgtgagggggataagggaacttttcctgtttcactaggtgcttacccaggagaaatgaagacatacatagacgcacacacagacacagtcttacaagggcatacaaattctttatgttcagcattattcctaatagccccaaattggaagcaattcaaatctccatccattagcgagcaaacaaattgtggcatgtctcaatctacccagctataaaaaaattttaaaaatgttaatacatgcaacatgaaacaatctcaaagtcattatgtctgtaatatatagaaaatggctataatcaaagaagaattcaagcaaaaaccaaatttttcaaatcaagtaaaagatataaacaaagaattcagagaaaatgaaatgcgaatggcccataatcatataaaagaggctcagcttcaaagaactacaaagtagagaaatacaaatttaaacacaacataccaaaaactgcaaaaaaaaagcagtactaagagagaagtttatagcagtcagcatctaaactgaaaaagaatagagaaaacaatgatacaccacaaccatgcggaatttatcccagggatgcaagactggttcagctttcaaaatcgtaatgcaatccatcacaccaaaaggttaatggagaaaaatcacatgatcatattaataaatgcaggaagaaagcactggacaaaatccaacatccattcataataataaaaagaattcccagcacgccaggaatagaggacttcctcctcaactggaaaaaggatagccataaacaagtatagctaacatcatagctaatggtgaaaaactggaagttttgtgagaaggtaaaaaataaagcaagaatgttctctcaccacccttttctaacattgtactggaagctctagctaatgcaatataacagcacaagaacacagaaagtacactaattggggagaaagaaaaaaaactgtctgtttgtagaggacattattgtccttggagaagatacaagagtctataaaaatatcctgtaatgaataagccgttatagcagttacaggattcaaggttaatgtaaaaaacaaaaccaaacaaaaacaaaaacaaaaaaatggcaattgcttttctaaatacctaggtatgaatctaacaaaatatatacaagatctttatggggaaaactattaaactgtgttaaaagaaatgaaagaactaaataaatggagagatatttcctgtttatgaataggaagactcgatagtgtcaggatgtgagtttttcctaagttggtctatagattcaatgcaatggcagtcaaaagcacagccagttattttgaagacaatggccaattgattctaaagaggcaaaggactacaatacctaacacaatattttagaaggacaaaggtgacaactgatactacctaacttcaagataagatataaagctacagtaaccaagacagtgtggtagtggcaaaagaataagcagatagacaaatggagcagaatagagagcccagaaatgtgtaaacataaatattgtcaactgatctttgatgaaggagaaaaggcaataaaatagatagtcttttttttttgagacggagtttcactctttttgcccaggctggagtgcaatggcgcgatcttggctcactgcaacctctgccttctgggttcaagtgattctcctgcctcagcctcccaagtagctgggattacaggcacccgccaccatgcctggctaattttttgtatttttagtagagacggggtttcaccattttggccaggatggtttcaaactcctgacctcaggtgatctacctacctcggcgtcccaaagtgttgggattacaggcgtgagccaccatacccggccaagatagtctttttcaacaaggtgctggaacaactggacatccacatacgaaaaataaatttacacacagacctttcacaaaaattaactcaaaatgcattacagacttaaatgtaaaatgcaaaactgtgaaactcctagatgatgatattggcaaaaatctagattatcttgagtttggcaagaacttttttagctataacaccataggcatgatctatgcaagaaaaattgagattctggactttattaaaattaaaaacttctgtgaaacacattgtcaagagaatgaaaagacaagctacagtctggggcaaaatagttgcaaaagacatataaaggaccatcaaccaaaatacacaaaaagattcttaaaactcaacaataaggaaacaaacaaccttattttttttcttttaaagccaagaccttaacagacacctcaccaaagaagatctacagatcgcagataaggatttgaaaaagtcctccgcatcatatgtcatcagggaaaagaaattaaaacaacaatgagataccactacacgccttctagaattgccaaaatccagaacatggacaccactacatactggaaaaaatatggagcaagaggaactctcattcattgcggctgggaatgcaaaacggtgcagccactttggaagacagtttggtgatttcttactaaactacataaacccttaccatatgattcagcaatcacactctttggcatttactcaaaggagttaaatacatactttcacacaaaaaacctgcacacggatgtttgttatggctttattcataagtgctaaaactggagagcaaccaagctgtcctgcagcagataaactgtagtacacccagaaaatggaatattattcagggctaaaaataaatggaaccatttagccatgaaaagacatggaggaatgttacatgcatattactaagcggaaggaggaaatctgaaaaggctagatatagtataagtccaacattctgaaattctggaaaagacaaaactgtggagacttttatacctttcataacaattaactcaaaatgggttacagatttcaatgtaaaacacaaaactataaaactcctagatgatggtatcgtcaaaaatctagattatcttgaatttagtgagaatgttctatacccagttaattgagggctttttatcataaagtaaaaagatcagtggaggcaacgggttggaagaaaagagggatgatgaatagacagagcacagagggtttctaaggcagtgaaaatattccgtatgatactgtaatggtggatacatgtcattatacatttgtccatatccacagaggtacaacacaaagagtaaatcctaatgtagagtgggctttgggtgataatcatgggtcagttttaacaattcgcctccagtgggcgatgttgataatgggggaggctgtgcatgtgttggggcaggggacatctcgaatatctctgtgccttctgctcaattttgctgtgaacctaaaactgctcaagaagtagtctttaaaaagacaaacaaataaaatcatactttctcccagattttaggggtatgtttgattatttttatactaaaacaagaacagagatattgagttaacaaaattcaatttttttaaaaaatttatttatttacttttttttattttattattatactttaagttttagggtacatgtgcacaatgtgcaggttagttacatatgtatacatgtgccatgctggtgcgctgcacccactaactcgtcatctagctttaggtatatctcccagtgctatccctcccccctcccgccaccccacaacagtccccagagtgtgatgttccccttcctgtgtccatgtgttctcattgttcaattcccacctatgagtgagaatatgtggtgtttggttttttgttcttgtgatagtttactgagaatgatgatttccaatttcatccatgtccctgcaaaggacacgaactcatcattttttatggctgcatagtattccatggtgtatatgtgccacattttcttaatccagtctatcattgttggacatttgggttggttccaagtctttgctattgtgaataatgccgcaatagacatacgtgtgcatgtgtctttatagcagcatgatttatagtcctttgggtatatacccagtaatgggatggctgggtcaaatggtatttctagttctagatccctgaggaatcgccacactgacttccacaatggttgaactagtttacagttccaccaacagtgtaaaagtgttcctatttctccacatcctctccagcacctgttgtttcctgattttttaatgattgccattctaactggtgttggtatctcattgtggttttgatttgcatttctctgatggccagtgatggtgagcattttttcatgtattttttggctgcataaatgtcttcttttgagaagtgtctgttcatgtccttcgcccactttttgatggggttgtttgtttttttcttgtaaatttgttggagttcattgtagattctggatattagccctttgtcagatgagtaggttgtgaaaattttctcccattttgtaggttgcctgttcactctgatggtagtttcttttgctgtgcagaagctctttagtttaattagatcccatttgtcaattttggctttggttgccattgcttttggtgttttagacatgaagtccttgcccatgtctatgtcctgaatggtaaagcctaggttttcttctagggtttttatggttttaggtctaacatttaagtctttaatccatcttgaattgatttttgtataaggtgtaaggaagggatccagtttcagctttctacatatggctagccagttttcccagcaccatttattaaatagggaatcctttccccattgcttgttttcctcaggtttgtcaaagatcagatagttgtagatatgcggcgttatttctgagggctctgttctgttccattggtctatatctctgttttggtaccagtaccatgctgttttggttactgtagccttgtagtatagtttgaagtcaggtagtgtgatgcctccagctttgttcttttggcttaggattgacttggcgatgtgggctcttttttggttccatatgaactttaaagtagttttttccaattctgtgaagaaagtcattggtagcttgatggggaggacattgaatctgtaaattaccttgggcagtatggccattttcacgatattgattcttcctacccatgagcatggaatgttcttccatttgtttgtatcctcttttatttccttgagcagtggtttgtagttctccttgaagaggtccttcacatcccttgtaagttggattcctaggtattttattctctttgaagcaattgtgaacgggagttcactcatgatttggctctctgtttgtctgttgttggtgtataagaatgcttgtgatttttgtacattgatttttatcctgagactttgctgaagttgcttatcagcttaaggagattttgggctgagacaatggggttttctagatatacaatcatgtcatctgcaaacagggacaatttgacttcctcttttcctaattgaataccctttatttccttctcctgcctaattgccctggccagaaattccaacactatgttgaataggagtggtgagagagggcatccctgtctcgtgccagttttcaaagggaatgcttccagtttttgcccattcagtatgatattggctgtgggtttgtcatagatagctcttattattttgaaatacatcccatcaattcctaatttattgagagtttttagcatgaagggttgttgaattttgtcaaaggccttttctgcatctattgagataatcatgtggtttttgtctttggttctgtttatatgctggattacatttattgatttgcgtatattgaacccgccttgcatcccagggatgaagcccacttgatcatggtggataagctttttgatgtgctgctggatttggtttgccagtattttatttaggatttttgcatcaatgttcatcaaggatattggtctaaaattctcttttttggttgtgtctctgcccggctttggtatcaggatgatgctggcctcataaaatgagttagggaggattccctctttttctattgattggaatagtttcagaaggaatggtaccagttcctccttgtacctctggtagaattcagctgtgaatccatctggtcctggactctttttggttggtaagctattgattattgccacaatttcagatcctgttattggtctattcagagattcaacttcttcctggtttagtcttgggagagtgtatgtgtcaaggaatttatccatttcttctagattttctagtttatttgcgtagaggtgtttgtagtattctctgatggtagtttgtatttctgtgggatcagtggtgatatcccctttatcattttttattgcgtctatttgattcttctctcttttttctttattagtcttgctagcggtttatcaattttgttgatcctttcaaaaaaccagctcctggattcattacttttttgaagggtttttgtgtctctatttccttcagttctgctctgattttagttatttcttgccttctgctagcttttgaatgtgtttgctcttgcttttctagttcttttaattgtgatgttagggtgtcaattttggatctttcctgctttctcttgtgggcatttagtgctataaatttccctttacacactgctttgaatgtgtcccagagattctggtatgttgtgtctttgttctcgttggtttcaaagaacatctttatttctgccttcatttcgttatgtacccagtagtcattcaggagcaggctgttcagtttccatgtagtcgagtggttttgagtgagattcttaatcctgagttctagtttgattgcactgtggtctgagagatagtttgttataatttctgttcttttacatttgctgaggagagctttacttccaagtatgtggtcaattttggaataggtgtggtgtggtgctgaaaaaaatgtatagtccgttgatttggggtggagagttctgtagatgtctattaggtccgcttggtgcagagctgagttcaattcttgggtatccttgttgactttctgtctcgttgatctgcctaatgttgacagtggggtgttaaagtctcccattattaatgtgtgggagtctaagtctctttgtaggtcactcaggacttgctttatgaatctgggtgctcctgtattgggtgcatatatatttaggatagttagctcttcttgttgaattgatccctttaccattatgtaatggccttctttgtctcttttgatctttgttggtttaaagtctgttttatcagagactaggattgcaacccctgcctttttttgttttccatttgcttggtagatctttctccatccttttattttgagcctatgtgtgcctctgcacatgagatgggtttcctgaatacagcacactgatgggtcttgactctttatccaatttgccagtctttgtcttttaattggagcatttagtccatttacatttaaagttaatattgttatgtgtgaatttgatcctgtcattgtgatgttagctggttattttgctcattagttgatgcagtttcttcctagtctcgataggctttacattttggcatgattttgcagtggctggtaccggttgttcctttccatgtttagtgcttccttcaggagctcttttagggcaggcctggtggtgacaaaatctctcagcatttgcttgtctgtaaagtattttatttctccttcacttatgaagcttggtttggctggatatgaaattctgggttgaaaattcttttctttaagaatgttgaatattggcccccactctcttctggcttgtagagtttctgccgagagatctgctgttagtctgatgggcttctttttgagggtaaccctacctttctctctggctgcccttaacattttttccttcatttcaactttggtgaatctgacaattatgtgtcttggagttgctcttctcgaggagtatcttcgtggcattctctgtatttcctgaatctgaatgttggcctgccttgctagattggggaagttctcctggataatatcctgcagagtgttttccaacttggttccattctccccgtcactttcaggtacaccaatcagatgtagatttggtcttttcacatagtcccatatttcttggaggctttgctcgtttctttttattcttttttctctaaacttcccttctcgcttcatttcattcatttcatctttcatcgctgataccctttcttccagttgatcgcattggctcctgaggcttctgcattcttcacgtagttctcgagccttggttttcagctccttcagctcctttaagcacttctctgtattggttattctagttatacattcttctaaatgtttttcaaagttttcaacttccttgcctttggtttgaatgtcctcctgtagctaggagtaatttgatcgtctgaagacttcttctcttagctcgtcaaagtcattctcagtccagctttgttctgttgctggtgaggagctgcgttcctttggaggaggagaggcgctctgctttttagagtttccagtttttctgctctgttttttccccatctttgtggtttatctacttttggtctttgatgatggtgatgtacagatgggtttttggtgtggatgtcctttctgtttgttagttttccttctaacagacaggaccctcagctgcaggtctgttggagtacgcggccgtgtgaggtgtcagtgtgcccctgctggggggtgcctcccagttaggctgctcaggggtcaggggtcagggacccacttgaggaggcagtctgctggttctcagatctccagctgcatgctgggagaaccactgctctcttcaaagctgtcagacagggacatttaagtctgcagaggttactgctgtctttttgtttgtctgtgtcctgcccccagaggtggagcctacagatgcaggcaggcctccttgagctgtggtgggctccacccagtttgagcttcccggctgctttgtttacctaagcaagcctgggcaatggcgggcgcccctcccccagcctcgctaccaccttgcagtttgatctcagactgctgtgctagcaatcagcgagactccgtgggcgtaggaccctctgagccaggtgcgggatataatctcctggtgccctgttttttaagcccgtcggaaaagcgcagtatttgggtgggagtgacccgattttccaggtgccatctgtcacccctttctttgactaggaaagggaactccctgaccccttgtgcttcccaagtgaggcaatgcctcgccctgcttcggctcgcgcacggtgcgcgcacccactgacctgcgcccgctgtctggcactccctagtgagatgaacccggtacctcagatggaaatgcagaaatcacccgtcttctgcatcactcacgctgggagctgtagaccggagctgttcctattcggccatcttggctcctcccctccaaaattcaaatttttaaaagaataagaggcatcaggctaggtgcggtggctcatgcgtgtaatcccagcactttcggaggctaagtcaggcagatcacttagcccaggagttcaaggttagcctgggcaacatggtgagaccccatctctaaaaaaaaatatgaaaaattagtcaggtttggtggtgcagtactggtagcgccagctactcagtgggctgaggtgggaagatcacctgagcccaggaggttgaggctgtagtaagctgtgattgtgccactgaattccagcctgggcaacagagtgatatcctgtatcaaaaaaagtggtaccaaaatattattggtcgcattattaatatttgattataatgttgcatcatactaatatataactacctaccttccttgccacatctcttcagggaatctgttaagttttctctttttataggatttacatataggtcttatatttaagtgtttagttcattttcatttgatttttgtatatggtgagaaactggagtctacttttatccttctgcacatggatattcagttttcccagcaccatttgttgaagagactgtcttttccccattatatgttcttggcacatttgtcaaaaataagttggctgttgcatggatttatacctgggttattaattttgtcctattagtcaatctgtctgttttaatgccagtaccatgctaatttggttactatagctgtgtagtatattttgaagtcaggtaatgtgatgtgtctggctttgttctttttgctcagaattactttgtatactcagggtcatttgtgattccatatatattttaagattgtttttcctatttctgtgaagaaagtcattggcatattgataaggattgcatcaaacctgtattgtcattataacaatatcagttcttccaatccataagcatggaatatctttccatttttttgtgtcctcttcattttctttcatcagagttttatagttttccttgtttagatctttcagttctttggtttaattgattccatcattttatattctttgtagctatggtaagtgggattgctttcttgatttccttttgagattttttgctattggtctatatatactagtgatttttgtatgttgattttgtattctgcaactctactgaacttgtttatcagcagtaatagttttttggtggagtctttatgtttttttaaatataagatcatgccatctgcaaacaaggctaattttacttcgtcctgtccatttggatgccctttatttttttcttttccctgatttctctgtccagatcttccagtattatgttaaataacagtgatgaaagtgggcatccttgtcttgctccagttcttaaagaaaagacttccagtttttaccagttcaatatgatgttggctgtgggtttgtcatgtatggcctttcttgttttgaggtatgtcccttctatgcccagttttttgagggttttttaaatcataaaggagcattgaattttatcaactgctttttcagcatctattgaaatagtcatatgattttcgttcttggttctattaatgtgatttgtcatgtttattaacttttgtatgttgaaccattcttgtgtccctgggatgagtccaaattgatcaagatgaatgatctttttaatgtgttgttggattcagtttgctagtattttgttgaagatttttgcatccatatttatcaatgatattggtctgtagttttcttttttgttatcatagtgtccttgtctgattttggtatcagggtaatgttggcctcatagaatgagtttagaagtatttcctcctcgtcagtgttttgaagagtttgagtagaattggtaccaattctttattaaatgtttggtagaaatcagcagagaagccctcaggttccaggcttttatttgatgggaaactttttatacagcttcaatcatgttacttgttactgatttgttgaggttttctatttcttcatgcctcaatctttgtaggttgcatgtgtccaggaattgatccatttcttacagattttccaaattgttggtgtatagttgttcataatagtctctaatgattctttgcatttctgtggtctcagttgttatgtctcatttcttgtttcttattttatttagttgggtcttctctctttttttcttagttaattgggcaaaaaaactaggtttgttgattttgtttttctttgcaaaaaccaacttttcacttgttgatcttccgtattgttattttagtgtcaatttcatttaattttgctctgatttttattagttctttctttctactcattttaggttggtttgttcttgattttctagttttttttagcacatcattagcctgtttatttgaagtattttgtttgtgatataggtatttattgctataaacttccatcttagtgctgtttttgctgtatcccataggttttggtatgttgtgtttcaattttcagttgtttcaaaatatttctaaattttcttcttcatttttgtattgactcattggttattcaggaggatgttgtctagtttccatgtgtttgtatatttttcaaggttcttctttttattgatttctagttttattccactgtggtctgaaaagatacttgatatggtttcaacttttttgaatttgttgagatttgttttgttgcctaagatatggtttattttggagaatgtttcatgtgctgaggaaaggaatatatatcccacagcagttgagtgaaatgttctgcaaatgttagttaggcctatttggtctactgtgtagtttaccttcaatgtttctttgttggttttctgtccattactcagagtcaggtattgtagtcccctactattattgtattgtagtctacctctccctttagatttagtaatgtttgctttatatacttgagagctccagtgttgggtgcataggtatttataattattatatcctcttgctgaatttactcttttatcatcatatagtgtaccttctttgtccctctttaaagttattgacttgtagtctattaaatctgatataagcatagtcactccagttcttttctgatttccattgcatggaatatctttttccatcccttcatgttcaatctatatgtgtctgtataagtgagtgggttcttgtaggcagcatatagttaggtcttgtttcttgatccattcagccatttgatgtttcttaattggagggttgagttcatgtatattcagtgttattattgataagtaaggatgtactaccgccattttgttgcctgtttcctcattgttttgtaactcttcatttttgtactctctttctttgttgttatgtgttttaatgtgtatgttttaacttgttgctttttattgttagtgtatctattacaaaacagatcttatggatataacaatttattttaaagagatgacaacttatcctagatcacaaagaataaaaacaaataaaaaattttaaaaacctctacactttagttccacccccttaccccaatatttagacttttggttgtctcaatataaatatttgatatatgtacgggttgatgtaactatcattatttttgatagatttgtcttttaggctttatactagagttatgagtgggttatatacctcaattacggtattattctggggttgtctgtgtactaaaacctacttttaccagtaggttttagatctgcaaatacatatatacttttttgcacttcagtatttttcttctttcatactgaagaactttctttagcatttcttgtaagacagatctggtaatggtgagctctctcagctttggttaatctggaatacactttatctctctttaatatttgaaggataactttactggatgtagtattcctggatcacaaaggtttgtctttctttcctttcctttcctttcctttcctttccttttctttcaacactttgaaaatgttatcctacttcctcctggtctatatgatttccattgagaagtctcttgccaggcaaatcggagctccttcttatgttatttggttcatatctcttgctgcttttaggatcctttctttgaccttaacctttgagaatttgattattatatgccttggcttggtcctatttgagtcaaacctgcccttcctgtacctggatatttatctccttctcaagttttgagaagttttctgttatttctgtgagtcagctttccactgcttgctcttgctcaactccctcttgaacattaataattgttaggtgtgatttttttgaagtaattttcaatatcttgtagatgatcttcattcctttgcattcttttttatttttttctcttttctcttctgactgtgtattttctttctttcttttttttttttttttttttgagatggagtctcactctgtcgcctaggctagagggcagtggctcaatctcggctcactgcaagctctgcctcaatgcaagttcatgccattctcctgcctcagcctcccaagtagctgggaccacaggcaccggccaccacgcccagctaattttttgtatttttagtggagatggggtttcaccgtgttagccaggatggtcttgatctcctgacctcatgatctgcccgccttggctgcccaaagtgctgggattacaggcatgagccaccgcgcccagccctgactgtgtattttcagatagcctgtctttgagctcactgattatttcctctgcttgatttgttctgaattttcagttcagaaaatgtattcctcagttccacgatgtctgtgtttcttaaaatttcaatatctttattaaatttatattataaatttctaagttgcttttctgtgtcatattggagatcacagagtttctttaagacttccactttgaattattggtcagggagctcgtgtattttcatctagctaggaccaatcactagttctttgctttgtctgtttggggaggtcatatttcctgttcactgttgtttcttgtggatgaatgccaatgtctttgcattgaaggattaattatttattccagtcttctctgtctgatttgttttctttttcattgaatatgtttgctgaaatattctttgtaatttataattatttcttttttctattaccactgttgtttgcacagtatatctttttccattcttaactttcaacctatattttgagataaaagtaggcttttggccaggcacggtggctcaagcctgtaatctcagcattttgggaggctgaggctggtggatcatgaggtcagagatcgagaccatcctggctaacacggtgaaaccccgtctctcctaaaaatacaaaaaattagccctgcgtggtggcgggcacctgtagtcccagctactcgggaggctgagtcagaatgtcgtgaacctgggaggtggagcttgcagtgagctgagatggcaccactgcatttcagcttgcagagggagactccgtctcaaaaaaaaaaaaaagtatgttttttatatacagtataaaatgtgttaaacaaaaattatgggaggctattgttttggactgagcttccgcactaggccctaatagaccagaccaaatcaaaccaaaacagagtcactcatgctgaatgacacgtgatcaaaatgacactttgaggaagcaggtattatagagcctcagaccagtttttcctaaaaccaggagcttctggtctacctcagtcagtgtaataaagaagtcacttctcctttaacttttaccaaaaaaagtaagttgaagtaacctgacattagccaatcagctttttattcctgacattagccaatcagctttttattccccctattgttccgtttccttgttcccacctattgtcccgtgggagctttgattctattttgtagaatggaggctgcccttatttatgaattgaaaataaaaacaactttaaatttgtaattttgtcttttgacaagttgaatcttatttttaatccagtccaacaatctctggcttttggttggactgttaaatctattcacatttaatgttgttagtaatagagttggatttccaactgctattttactttctgttctttctctctccctcagtttacttgttcctgtatacgttcttcttttgcattaagtgaatattttctagggtaacattttaatttctttaatgatttagctatttttttagtagttgctctagggtctgcaacgtacatcttaactcgtcagcatagatttatactaacataattccagtgggatataaaaaatttactcctctatagttcaattccttcacccaagttttgcattactttgttatgtatattatttctaaagatgttacaaactcggcaatgcattgttgtcattatttttataatttcatgtcttttaaataatctcagagaagagagaagagctagtatatatttatagagtttgctctattattattcttattggccattttggattctcttcatttctcctgtggattcaacctcctctacggcatcattactcaagacagctttgttttccgtctcctcctttgtgttgttattgtcacatagattacatttttatatatgataaacctaaagtgtaatgagatgcatattgttctacatgattgcttgctaaatcagtcaagtgaaaaaaggaggagaaatatgcaattacactgtcttgtacaattatctacataattaccttaatcagtgctcttgttttcttaatgtaattttgatttcatacttggtctcacttgcttttagtctgaagaacatcttttagtattttcttatggcaagtctgctaggaggaaattatcttagtgtttatcttagaatacatttatttttatttcagagagatttttccaaacatgatattttattgttgacaacttttgcccccctagcatttcgaatttgttattccacttccttctggcattgattttcttgttctgatgggaattccactgttatccttattgaggggacctcgtatgggatgagtcatttctccccactacttttacagtttgttttggtctttattcgacattttgatgataaagtgtgtggatcatcttgtgtttaccctatttggatttttttgtgttccaggatgtgtatattaattttttcaggttttacatgaactgttctattttagcttaaaataatagtaaaataattttcaaccaccaagctattagaggggcaaaatgaaatacatagaattcttgattagttttttaaatgacaagaatgaagataatacaagtagggcaagagggaaaccaatggtaagatgataaaaataaacccaaatacatatcaaaatatatttaatataaatagaaaaattatccagttaaaagacaaacattgctagactggaccgaaagaaataaaacaacataaaactaaacaaagtgctttctgctttcaaggtccattaggaaagaatgaacatgaactcttggaaaacatagaccaaatattaaccaaaaaagaaagttggcttatttatactaatactgtatatcagacagagtacagtttaaattatgatacattactacaggtaaaggatcatttcataatgtcaatagggtcaatctaccaggaaggtataacaacataaacgtttatgtacctaataatataggttcaaaatatgcaaaatgaaaagctcctgcaaggttccccaaggaagttatcacaaagttacctcattgctgatgagcgggtggggtattgttgagcagatggaaaaggggcaagtgctttgtcacaaaaaggagctggattagggccagataactcaatagagataagctgattttgtctttgattaagaaaaaagttaagtggaagggctggtgtctgttaaaaattgaatgtacagtgtggataaacagagagtgtcctgataaaatatccaacttcacagatgatgaagatttcttccaggtggcaaaatgcatgcaattctacgaggcaattctgctgtaagccaattaaaagatggcaggggagtcttggttacattttcgcattaaggaaataagtaatcctgactctacatattcaatgataactatgagcaatcagtaacaaaacaataaagagccattgtgtattgttaccacagacattggcttgatctgccgccacaactgaaaaagccaacaacatctggccaagcaccataatgaagtcaattttagaaacaaagtgagaaatataagcttgtataaaaccatgatacagctgaatgctaagttctgcacatgctttccatcaccatacatccagggacaaagaagacaaagaagacccaaggacaaagagctgtaacaatttagggaatattataaaagactttacttaaaaacaattggactctttagtctgcacaggttaagagaatagggtggaatctgtaaaactatggatgttgtaattaggaaaaatccagactccattcaatcctggtacatggagtagtttcctgtggctgccaaattaccacaaaattagtggcttaaccacaataaaaatatattgtctttgagttctgtaggagaggagcatgggtctcatgaggctaaaatcaaggtatcagcagggctggttccttctggaggctcagaagagcattttttcctgaattttttagtttccagaggctgcctctgcaccttggctcatggccccttggccatctttggctagcagcagcaggttgagatctcacatggtcttaccctcacctctcctgcctgtctcttctacttttgattgcactgggccaacacagataatccaggacattctcctcagtttaagtttggctgatcagagaccttaattctatttacaaccttaattctccttggcatataacatgactattcataccttcttaggattagaatgtggatatctttgttggcggggattatcctgctcatcacaatatacaaaggtaatgagtaataataccctgaggtctgaaagtagcagtgtggttttttttttaaggacaaataaaggaggtacaattttttcagcaggtgatactggctgaaaatatacttagcttaaaaacttcacggatgataaatgcttgacagatcagcaaaggatgccagagattctggggatgcattcttaaaattttatgctttatttttctcatttacaagaatcatataaatatttaaatagaaataagaaaaatggtgggaagagtcaagatggctgactaggtgcagccaggaagagcttattctatggagagaccagaccatcaagaagactgccacactctgagcagatctttgggaggaaggcattgagagcggacagagggaggacacagcctctgggctgaatgggaaggaaaccgcgaaccttgcatggggttgccaagcacgaggactagttcctggccccaagcagctcctggggaaggggcaagttaaatgggcatcaagtggtccactcctgccacagacctccagaagcctacctgcaggagaacccatgacctacatggacattagagctggcaaggagagctgcttggagagttgctaggaacagcacttccgcctgtgtgaagcccagaggatttggcacgggaacgtctgcagtggagcaagcccaagggtgcgcatcttggaaggctcaccgtgcttctctagctggcttgggtctttgtcgattgtcagacctggacagaatatctttccagtgggacagggccagtctgatctgagcacgcctctgcctgccagcctctccagggttcctgcgtggctgcacctacatctagcacagcctgagatgcccaatcggtgcacttgccactggctactgccatagctcctttacccgcagaccccacctaacaatcagagaacttctacaaacaggccactgccagcatgcagcaacctgcagccctacccactgctttgtcagggcacactcacccacagcctcccccaactgctttgctgaagttctcatgcatggaccacaccattctacagcgatcagtgtgagcacatggaccacacggcaccacagctctgctctgcttttgagacgcaaaaatcatacaaaagatcaacaaatccaaaggttgcttttttgaaagataaataagattgattgactgctggctagactaatgaagaaaaaagagagatactccagacaaacacaatcagaaatgacaaagcagacattaccaccaaccccacagaaataccaaagatgctcagaaactattctgaacacctctatgcacacaaatctgaaaacgtagaagaattaaataaattcctagaaacatacaacctcccaagattgaaccaagaagaaattgaagccctgaacagatcaatatagaattctaaaactgaatcagcattttgggaggccaaggagggtggatcacttgaggtcaggagttcgagaacaacctggccaacatggtgaaaccccatctctaccaaaaatacaaaaattagccgggcatggtggcacgcacctgtagtcccagttacttgggaggctgaggcaggaaaatcacttaaacttgggaggcggaggttgcagtgagctgagattgtgccactgcactccagcctgggtgacacagtgcgactctgtctcaaaaaaataaaaatataaatataaatataaaaaaaagaaaaagagtaaaattgaatcagtaataaaaaaaatctaccaaccagaaaaagccctggaccagatggattcatagctgaattctaccagatgtataaagaagagctggtaccaatcctactgaaagtattctgaaaaactgaggagaagggattcctccctagctcattctatgaggccagcatcattctgataccaaaacctggcaaaggcacaacaaaaaagaaaacttcgggccaatatccctgatgaacagaggtgcaaaaatcctcaaaaaatactagcaaacaaaatccagcagcacatcaaaaagctaatccaccactatcaagtaggctttattcctgggatgcaaggttggttcaacatacacaaatcaatcaataagtgtgatcaatcacataaacagaactaaaaacgaaagcctcatgatcatctcagaagatgcagaaaaggctttcaatgaaattcaacatgcttcatgttaaaaaccctcaacagactaggtattgaaggaacatacctcaaaataataataagagccatctatgacaaactatgagaacaggacaaggatgcccattcgcatcactgctattcaacgtagtactggaattcctagccattgtaatcaggcaagagaaaaaaacaaaaggcatccaaataggaggagagggagtcaaactgtctctcttcacagatgatatgattctatacctagaaaaccccatagtctctgcccaaagaatcatggatatgataaacaacttcagcaaagttttaggatataaaatcaatgtacaaaaatcagtagcatttctatatatgaataatgtccaagctgagagccaaatcaagaatacaatcccattcacaatagcccccaaaggaataaaatacctaggattacagctaaccaggaaggtgaaagagaattgaatgcaaacactgcaaagaaatcagcaatgacacgaacaaatggaaaaatattccatggctcatggactggaagaattaatattgttaaaatggtcatgaggcccaaagcaatttacagattcagtgctagttctatcaaactactgatgacattttttacagaattagaaaaaaactatcctcaaattcacatggaaccaaaatgagcccaaataagcaataaaatcttaagcaagaagaacaaagctagaggtgtcacactacctgacttcaaattatactacaaggctacagtaactgaaacggcatggtagtggtacaaaaacagacatgtagagcaatggatcaggttatataacccagaaataaagctgcatatccacaaccatctgatctttgacaaagctgaccaaaaaaaaaaaaaagtaatggagaaagggctccttattcaataaaaggtgctgggataactggttggccacatgctgaagattaaaactggactccttccttacaccatatacaaaaatcaactcaagatgcattaaagacttaaatgtaaaaccgaaaatgataaaaaccttagaagaaaacttaggagatattgttctggacttagaccctggcaaagctttcaagacagactcaaacatcaattgcaacaaaaccaaaaactgacaagtgggacctaaatagactaaggagcttctgcacaggaaaagaaactatcaacagaataaacagagaacctgcagaatgggagaaaatatttgcaaactgtgcatccgacacaaatctaatacccagaatctgtaagaaacttaaatcaacaagcctaaaacaaatggccccattaaaaaatggtcaaaggacatgaacagataattctcaaaagaaaacatacatatggccatcaggcatatgaaaaaatgctcaacattagtaattattagagaattgcaaatcaaaaccacaataagataccatctcacacctgtcagaatggctattattgaaagtcaaaaaataacagatgttagtgaggttgtggagaaatggagacacttatacactgctggtgggaacgtaaattagttcagccactgtgggaagcagtttggagatgtcccaaagaacttaaaacacaactaccatttaacccagcaatctcattagtggatatatacccaaaggaatagaaatcattctaccataaagacatatgcacgcatacattcattgcagcatgattcacaatagtaacaacgtggaatcaacctgcatgcccatcagtggtggagtggataaagaaaatgtggtacaatgcaccatggaatactatgcagccatgagaagaatgaaatcatgtcctttgcagcaacatgaatggaggtgaaggccattatcctaagtgaattgacgcaggaacagaaaaccgaatactccatgttctcacttacaagtgggagctaaacattgactacacatggacacagagaagggaacaatagacactgggacctactggagggtggaggaggggagggtgaggatcagaaaactatcatcgggtactatgcatattacctgggtgatgaaataacctgtacatcaaacccctttgtcacacaatttacccatgtaacaaacctacacatgtaccccctgaacctaaaacaaaaattgaaaagaaaaataagaaaaggaaaacattccaccatgaatacttacttcagtttttaatgttgctttgaatcttttccatatacagacttttttttttttttttttttgagacagagtcttaccctgtcacccaggctggaatgcagtggcacgatcttggctcactgcaacctccgcctcccgggttcaagcgattctcctacctcagcctcctgagtccctgggactacaggtgtgcgccaccatgcccagctaattattgtatttttttttttagtagagatggggtttcactgtaccaggacaagccacagacaaaactcctcagacactgagttaaagaaggaaggggtttatttggccgggggcatcagcaaggctcctgtctcaagagccaagctcctctagtgagcaattcctgtcctttttaagggctcacaactctaagggggtgcatgtgagtgagtcatgatcgattgagcaagttgggggtacgtgactgggggctgcatgccccagtaattagatcggaacaaaacaggacagggattttcatggtgcttttctatgcaatgtctataatctatagataacataaccgattaggtcagggtcgatctttaactcccaggcccagggtgcgacaccgggctgtctgcttgtgaatttcatttctgccttttagtttttactttttctttctttggaggcagaaattgggcataagacaatatgaaggtggtctcctcccttactcccccttttgagactctcacttaatagtgggagttctcactttcatttttactacccatgtcttcttgcaagacagatcgatagtgattcatatagtacacttgtgctgaaggattttggtgaactaaggtagcgatgaagctttttatcatttgaagaagtacaggtagcaaacaagggagcagtaagtaggttcttattactattataactcttattataagagttttaaatcctcttagcgctgggaactgttttgtaaacagggccctaggatcaaatctatgccacacttgcacgggcacatgtgccagttttgtcatatctctaactatgtcttcaactacttgcctttgattatctatgtgtaggcagcaattagtaaggttaaatttcctacagacttctccttcagccgctagcagagctaatctattttgatagataggatttcttatctgagtttcttgccagaccagaatagtcaaggctctgccagttttattagtgattatttttaagacagcttgtaatcatatgattcagttgatcatgtaaatgggggtccggtatctttacgagccatcttgtgcctaagtagcaggcctataacatcatatgattctctcagggggccatttatcatttttctaatttcctatagctatgcttttcttttcacaggaagtacagacagggaagcctaggagttcgcctgtttttatgggcaataggaagaaagatggtttaatagtgctaataacacaactacctgcctactggtcaggtaatttggcataagctctatgcctacatattcagtataatccagtgggggctgtccaggctcagtgggactctgggtgggtccacacggtttgcaactttggaaatttactgaatggatttctctctgtgtgacttgaactccaccaagtgactgtttttgtggtactattatacagtttctgtcctagacaactaagtcgtcctacagggtgaatgaattcttttccttctctagctatgcaatattgtctaataattgaggattttaggacttagaaactatcagggtgatttttttgagtccagaattcatcaggaactggatctgtaggtactaattctcgggcttcctatggccattgatctcttattatagtttcttcatatacataacattgaagtgacattgagagactgggctacatactcagctaattgcaaaaacaaatttcttgtttttcctggaatttctggtactggcacatttagttcatcatagaaagtttgaaacaccagctcaggagaacgtttgtaaacttctcctcgaactaagatatttacccaaggatccagtccggcctcgtcacttcctaaggtcacatgctcctctttcttccagcgaggatcaaggggattggttattactagctctaaggggttacattgtcctttagtacaggaagggccactttttcctttctgaaggtggcctggatctttttcatttttttgttttatctaagtggcctaaatgacacaagaccagtatttacatttatttctacacagtcttaatttatgacagatgtacttattttctgccatatagcctcttttctaattaagaaaactataacttattcttaattattactattaatgacagcacaagcatcaaattttaaggtgacttgtttgggcacctttttttcttttgttttggttaacacgttaccgtatcgtttatgagccttcaccagtccttagtctttaatattattttaaaaactgtggccatgggaggctcagatgggtcacaacacacatcaggttggtcatttcctaggctacatactttgtatagaataacattatataaacaagttctttttagagttccagtatacttaaaataactataaaacaataggactgtagcaactttttgtcctacctcagtgacttgatgtatacactgggaacaggcttcagtctgaggaaggacagttgaagtctttactgtacaagtccaaattttaaggaaaatgagtcctgcgatgagttttcttatgcttcggccgtgcgtggaccagtcagcttctgggtgtgactggagcagggcttctcatcttcttcagagtcattttgcaggggtcggtgaagctgctcctgtccatgtaccactcacagtctactgatgtttaaggatggtctctggaggttgggcctgctagaataaactgagtctaacacctctacacagttatgttcaactgggctctctgataccaggagcaaggtggtggggcttagggtgttgcaaacttcaatggttatgtggggattttcacatagcaagctttggtacttggttaatctagcatttgttaactaatgatgtcttttggtagtcattaaagttactacatgggggggcctttatatttaggttttgcctaagtgttagtttatctgcttcttgtgctaacagggtcgttgctgctagggcctttagacctgggggccagcctttggaaaccttgtctagttgttttgagagataggccactggccttggccagggccttacagtctgggttaaaactctaactgctattttttctctttctgacacatagattgtaaagagttttgtcaggtcaggtagcctcagggctggggccgacatgagtttttcttttaactcatgaaaaccttgttgctgttggttgtaatagatgtagtttatctaatctatatttttattaactgtcacctactaaaatattgacttaaatcctgcagctatttgatttcaagctttaaattgatctggtattcctcgtgagactccaattgcgtctaaatagacatgagagtcgaaagacttataaggggcttctctcgctttacgatgtcttatttttttttccttctggttgatgaaatgccagggtgaaagggatagccaactggactaaaatacaagtgctactccagttattcggcagagtgcccagtaaaggtctaccattgatactactacacatccactcagggatgaacaagggctgactgactgataagctcttgaaaattcttaagctcactgcatcctttcaggtctctaaggaacactaagtttcctcgttgtcataagagacacaaagtgaacttagtgttgggagacggaggctggatggccctcgggggctgacccgcagggtgccggacttcgggatatagcagagagaacttggcatgacttattactccaggctgtagaatcctggaaaagagctactatgcagcctatgcctggtcgactggaggaccaccttagtggaagggggacaatcagggcctctggcctgccatgtgcacaagcataacaattgcttttgtttaacgtgcaggtggaatgtttgatctattttaaccagccatttgcatcttggtatcctgtcttaattgctaaagtttgttttaagtctttaacttctatgatcttctagtaaaatgaatgtatggttttaggaaattacaaaaactggttggggcagtccatccttgctctttagtggtctacagaacgttggactaactgtggcatgaaagctctacatcggggggcaagattcctggttggcactggggtctttattgaaatctccctggattaaatggtcctagtttactaacgcccagtctgaggagagtcaggagggacagatgtaagtttctgaagtagagagctgtctttgactaggcaagtcctcacagggtataacaaggcaaacattaaatgcagtagtttgaggcggcgaaattgacttggttatgttaataactagatggttagcaacagaacaaggaaagaaaaaagagtaatagaatagatgaaaagagttaaatttttcttagctttagtttggtagggttttcccctgggactatggcctacaactctggagggggtggcgttttcttgactcgggtgtaataagtccattctttttttttttttctttgctgtgtgaacagcggtcttggtggttagcagcacaaggtaaggtccttcccaggctggctcgagtttttcttctttctaccttttgatgagaacgtgatcttcaggctggtgctggtttactggaaattctaggggtggtacatgtgctaaaagacttttagtttttgagagaaaagaaagtggaagataaactaagtatataatttctaagaaattgaccgtttgttttaaatgtggggaccttggtggtggactttatagtccttagtgcctttttactgaaagatttcctttagcacctatttttattagtttttagactaaagaaagccaaatactattttacatttaacaatgcttctcgtatgatttttataccagataagctaaattttatctttatattagtgtgttactaatgttaaacttaattttaataaaaccttgtagacatatttatctaatttttaattttggctagaaggtaagattttatttacaggcaatttttttgacatgcctcaactttctgacttattacaaatatttctttctttaaataaccagttaatttatttcaggacaagaatttattatataatactctttttatgtaaactctgcctccccttttttatttttttcttttttttttttttccgaagatgataaccattcttttctaaagtgaactttttttttatgtctgtggactagactgtctaaggccacaagattagaagttactataatacacgttacactgttaacttttagcaaactttacttttgttgaaaaccttgtaaatttgggattttatttatcctttgatattaataagaccttgttttgtccaaattagaattggtatagatggctttttttttttttatcaattacctgagaggaaccatcaatcgtcctgtccggaagggagttcctcctaggtctggtcagacctttgtatggtaattaagatttagatcccctgttaggaaacctgctgggttaagggaattttcagtggttaatgttaaatcacctttctttctttctctttttgactttgtctctctctctctttgactttccttttgcctctgtctctttctctctctctctgcctctctctctctctctccttgactccttctttgtctatctcttcctctctgtctctttcctttctctctctctgctgctctttcattgcctctgccagccatttatgctgctgttctctcaaccactgtgtgttgggggcagggggtctaaaaccagctgtaaccaagtgtctatgtacgggagctggtctgggttccctggcttacagggaaccttgtgccatacctttgaaacaggggacctgtccaggcttccttctaaaggccaacctacctctaatgctggacagtctatcttacacaaagtttttaagttttccttgtgtcatagtactccatagtctctcttaaatcgcccccccgacctttttttttttttttgaaaattttcaacatagttcctagaggggtgggcttactttgtgcctcacctatgtttcctcgagacaaaacatcacgctcacaccacacacacaccacaaaacaatgggtaaaaaaggcacacacgcactttcgtagtttacaccaaaccaaaatcaaaaccaaaatcagagtatccagaaatctaagccaggtcaaaaccaaaaccaaaatatcaagcaatccaagtcaagtcaaaaacaaaaaccaaagtgccggtacaggcacgccatgggtgatcaggccacgcttccactcaagtggcgtgggcaagttcccaagaccagtcctgtcaagcaattcaaaccaagtcaaaaccaaaaccaaaaccaaagtgccgataaaaggcatgccgtgggtgatcaggccacgcttccactcaaatggagtgggcaagttcctaagactggtcctgtcaagcaattcaaaccaagtcaaaaccaaaactaaaactaaagtgtcgataaaggcacgccatgggtgatcaggccacacttccactcaaacagagtgggcaagtttcaaagactagtcttaccaagttttagatgtccagactccaagtgcccattccttcctggtgttagccactgcgttgatcctccacgggggcctgccacacactgctctggcgaggcgtccaccggggcaaatgcctatctgggagtgctctcaggatccgcgtcgctcaggctggccggagtcccccgcagggatgttccacagggcagacttcagccgcctaaggagctgcctcgaccatccaccaatcacctcgcttcccggtcagggaaccaagaaatgtagcaggacaagccacagacaaaactcctcagacaccgagttaaagaaggaaggggtttattcggccgggggcatcagcaagactcctgtctcaagagccgagctcctcgagtgagcaattcctgtgctttttaagggctcacaactctaaggggagtgcacgtgatgagtcgtgatcgatcgagcaagcagggggtacgtgactgggggctgcatgcgccggttattagattggaacaaaacaggatagggattttcacagtgcttttctatacaatgtctgtaatctatagataatataaccaattaggtcaggggttgatttttaactaccaggcccagggtgtggtgccgggctgtctgcttgtggatttcatttctgccttttagtttttactttttctttctttggaggcagaaattgggcataagataatatgaggggcggtctcctcccttatcaccatgttggccaggatggtctcaatctcttcacctcatgatctgcccaccttggcctcccaaagtgctaggattataggcgtgagctactgcaaccagcctacaaacatcatttttatatctatacacagaataaatacatgctcacttcctttttctcctcatgtatgaaacaagcattttctgttactcccaaagtgttgtgattaaatttttaagtgtgtgctggctgttagctgcagggaggatgtgagcagagagtgaagccgtggcccgaagtgtccacaggtgtgtgcacaaagcctggtggtgtgcatgggatggggtctggaagggcgtggggcagggacaaggctgggctggcctgggccaccatgtcctggcagggaactgagaggtctctgggaattgcgaggtctctgagtactgtaaaggccagcatggcctggcagattgtcaggagggtaagtgggtcaaaggaggaggacagaacatatggcatttggctgtgtgtgagccagatctagaagtaacatgtagactctcgtatgtgggcctctattggacccttgtcccaggtccagcatgtaccaggtcagccctcagatggaaggggcctgctgtgggaggagtgcaggggaagggggccgcgctccgctcctgcgcagagccctggggtggcctaagccccggggagaaggcacatggtgtgactgtcagcattcaggatggaaagtccaaggcccataggcagttgtttcccccaaagcttgggatggatgggaagcagcagcggagccttgtatctggcaggtacatcccggaaggcagtttggagaccagatgaggtagaggatgcgagggccatcctggatgcctcggctctgcaaataccctgaatagacatgacctggaggtgttggattctgtctcggccctcccagcaggaaagggacttagaagagaagcaatcttgattcataataaccatgtcctttttcttgtatatctggtttgtgaactgaggttcgtgtccactgaggctcttgttccctcccttcctccagctgggtcatgaccttagctctttgaccccttggcttagggaggcctggggttggcctgagcaatgaaaccccttgctagagttggctcaaggagccggcacggccatcaacctcactgtgggttggtttggaccccaccccattgttccccaaggtggaatgcaggtgcctttcagtgacgggtaaaacacagcaaagcggcagaaattttaggtgagagggaaaggtgaggccaaggaacggaaagagaggacgggggtgtggcattggccccccaggactcataacatgatgaagcttccagatgtagcaaataaaaatatagggcgcccagttaaatttgaagttcagataaagaatgaacattttttagtataagtcagtccaaatatttgcataggatatatactgaaaagttatttattaggtacctaaagttcagatttcactgggtgccctgtgttttatctggtgaccctacacaatcaagtcctctccacttccttagagaagggccaggaactgagctctcagaacctcctggccaggcaccagagtgtcaccaaaggtcccctgaggggctcaggaacaacatggggcgttttatccctgtagagggtaaaacaaaacggtgttttatatttttaaaaacatggttatattttggacgaatatatgaaattaaagtgaaatttaaaatataatgcaatttataaaatagttttatcacactcctcacctatatcccaggcatctgtagtcctcttctttggggaatatctgagattctcagttgaaacacttggggtggccactagagggaggcttacagacttcacaattcacagcttccccactacgaaaaagttttttcagggtagtacaagtaattcacgtgctactattttgttgtcctttcttttctgataaatgttattgtctttctcctccttggtgtctttcttctccccttcagctactctgaattctgtgtcctttttttaacccattcaaatatccctgctgtgtagctacttaaggtcccactctgagaccccctggcccagcagtgggttgcttgctccataatgacaagggctgccattttgtgagctttcgccgtgtgtcaggcatggggctatcagcttggcatgtggtatccatcaagaaacagtacctgggccaagtgtttaccccacagggcatttaaggcaggggactggctagtgggggtggcatggctgtgagccaaacccagggacgcagagaagcagcaagctgccacacctcagctggagggacagagggtggaggtggggtggtgggaacctggggccaggtcactggatggaggctgcttcctgcactgctgaagatgctgtgtagggcagaacaagggtggtaggggaacatcccggcctcctgccagggccttcaggagcagctgatgcaggaaaggcagccccgcccccttgccatccagaacagaacaggggagacaagaaagggcgtgaggacacgatgccctggagccagcacacatgcctcatcttgttgaagtgtgctcattttacagccagggaatctgaggttcagagagtttaagtggctgaactgcagttgcacagcttgtcagaagcagagctaggatttgaaccaagaagcctgcctgaggaatccatgctcttgaggactgccatataacagaagagacagttctggtatggccaagttcacttttgccctcagcctttgcagacatcactaatcaatcagagcctgggtcctagtgagccttgaggcaggtttgcaatatggatggtgccatcctggcagacatgactcaccaaaagtgttcatcccacacagaatcgacagtgtcaggcaagattcacttgcaagaaatagaaaccatgtcccagttctgcacagaatgggagttactacaggggcttaggtgctcacagaagtactggaagggctggaggaagagactctaggaggacagctcagaagttgtcccccaggccgaaatcgtcctacctctgcctcaagcaagaaaaggcagtgccaggaggttcccactggcatcgtttacctctagcacctgtgctgcagtccagggacaggaaccaccacagctgccactcagcacttgtccatcacagaccccaggatgctgtgggggaaccagcatctccagcagcagctacaggcggtagaaaacagaaagtggaagagaggttctgggggccaggcaggtgggaacaaggagttattgcttaatgatgaggggctaatgaaaaagttctggaggtggatggtggggatggttgtacaacactgcaaatgtacttaatgccaatgcattgtactcttaaaatggttaaaatggcacattttatgttgtatatattttaccacaaaaaatttcagaaaagaatgaaaaaaaatctaaaaacataaccacctcacatccattaggatggctatcataaaaacaagacaggacaaaataagtgctgatgaggacatggagaaattggaacccttgtgcactgttggtgggaacgtaaaatggtgccatcgctatgaaaaatgatgcatcctcaaaataaccagaaatagaattaccatagcctccggcagttctgcctctgggtacatacctgaaagaaccgaaggcagagactccaacagatatttgtacacacgtgttcagagcagcattattcacaatagcccaaaggtggaggcagcccaagagtctatggatggatagacagagcaaatgtggcctgtacacacaacagaatacgattcagctttaaaacggaagggtattgtgacacaggctacaccgtgggtgaaacttgaggacattacgctaagtaaaataagccagatgcgaaaggacaaatactgtgtgattccactcataagaagtcccttgcatagtcaagttctcatagagacagaaagttccagggtggttgccgggggctgggaggagggagaatgatgggtagagtttccgttttgcaagatgaaaacagttctggaaatgatggtggtgatggttgcatgatgtaaatattcttaccactgctgaactatattcctaaaaatggttaagatggtaaattttatgtgtatttcaccacattttttaaaagaaagtaaaccagaagaagatgaacaggaggaggagagatgaaggagaaggcgaaggatggggaaacccagggtgggacagatatagaaagcagatgaatgagacagggtgctgaccaccccccatgccaagggaagcccccatcttggctcccccatcaggggaagcccccatcaatattgccatcaatattgatggcagcatcaatattgtgacccagcctcagggctcactgggacccaggctctggttgattagcaatgtctgcaaaggctgagggtgaaggtgaacttggccatgcagaagctgccccttctgttatatggctgctgtcaagagcatggatcctgcaggtccaggaggccctggaatgaaagagagcatttgtgaggataaggaacgaaagaaatcaggttttttaaatgttaaagctgttaggaaaaactgtggaagacttactgggaatgattgcaatggagaactagggttccagtcccgcatctgggttatctgattcggtggggtttctgtgcctttgactgtctctgagctatttcgcagctctgtacatggtagaaatggatggagtgcaaattatcctgggttcatagaaaggtggatgagtcttggctggtggaggtacactgggcccctctccggaagctcattttgcactttcactgagcgaattcatgtcagcattcctgactggctgccctttggattctcctttgaactggtttttaataccttattggattcctcattagttagtgagtacaaaaaaaacagatctttgacacatgttcattttatagatgtttgaaagtcatcattttaccttttaaaaagtttcacattagcagaatcataaaggatggagaatagaatagaccggaagattcacacgcatgctgagatccaccaaggtcttcagaacctgggaggacttcaccccactcagatggcgaccccaagagtgacatgggggaggcagagtttcagcctctgtcttcacaagtaatttgatgaaaaatgacaggctcacactatgacccgtctgcagacctgagagggagctgatcggcccattgaggagatggttggagtcagggcgcgcttgagttccccggtctcaggaagctggagagctgggctgggcccagcagagactgccatgggctggggccagaggggcctatggcaccaagagacaatgcggacggctccttccctctgtcccctgcccaggcccacagctctggacttcgaccaccactcagatgaagaggatgagtccaaggaacaccccgggcatggggggaaagcagcgtccgcccccaggccaagggcagagccagcctcccctgcctgccctgatgcagcatgtggaatcatagcctcttaccacagccacggagagaaaagggtggacagggagggggacgcagcgagacacagagaatatagagcatgatcagacatgccagagagacagagacagacagagacagagagacagagacagacagagagagacagacagagggagacagacagacagagacagacagagagacagtgacagagagacggaaacagacagagggagacagagacagagatagatggagagacagagacagacagagagacagagacagagagacagagacggagacagagagacagagacagagagacagagacagacagagggagacagaaagacagagacagagacagacagagacagagggagacagagacagatggagagacagagacagacagagggagacagacggagggacagagacagacagagggagacagacagagacagagacacagagacagagggacagagacagacagggagacagagacagagagacagagggacagacagacagagacagatggagagacagacagacagagggagacagacagagacagagacaaacaaagggacagacagaaacagagagacagagacagacagagggagacagagacagagatagagacagacggagagacagagacagagacagatggagagacaaggacagacagatacaggctgagacagagacagagagagacaaacaggctgagacagagagacagagtcagacagagacagagacatacaggctgagacagagacaaacagaaacaaaaacagacaaggaacaaagtctgcaaagatgcagacagagacatgcagagggacaaagatacagagactgagacattcagagggaccgagacatagggacagagagatatagaacaaagtccagagggacagagacacagggacagaaagatatggaacaaaatttgaagagacagagacatacagaaagagctggagacacagagacagagacatacggaacaatgtccaaagagagacagagggacagccagagacattcagaaggacagagacacagagacagagagatatggagcaaaatccagagagacagagacatagggagaaacacagacagtgagatatggaacaaagtccggagagagacacatagacacagagacagagatgtatggaataaagtctagagagatgcagagatctgcagagagaaagggggagggaaatatggagcaaagtccagagacacacacacacagatacttagagagagacaaagcaagaggcagagacttcgagacagagagatggacaaggagaggcaacaaatgagacaaacctgctcgcccagcaggggccacctgtcacatgattgtccaggtcccatgccatggggccaggccaggctggtgcctgatggagcctcccaccctcctcagtgggcatcatcccccgtagggcctgtgtgaggttggtgccaggctgtggtcctgtgtccagctcagcactgggcacatgtgcaggctggagaggggctctgaacgactaagaccttcccttggcgatttgctgttagccattcacttacacccagggaggcttgatcacccaaaccaggaaactttagagagggaaaggagtgtggttaacagtcatccctggacagcaaagcatgcaaaggggctgtcccagcgaacgggaatgtgcagtcccagggctgacgactgtccctgttccaaagtgggtcccatcacaggagtccaagcataggcaggccctggcttgtgggctgccatcggtcacgctggccatggccatgttgaccacccctgagggacacagctgcttgggaggggaagtgataatttttaacctgggttgtttaaatatgaatacaaagagggctgagcgcaacactctcatgaccttaaaagatgaaacaagaactttaagaaattccatctttgtttcccactgcttcaagctgcgctgtggtccatctgagggcagtctcttccatcttcctcctgagtctaggagcccctggcagagacatctcgaactcttgtaacttttctggcaaccacaggcggacacctgatcaacgccatgagtcagatattccatttaaagagcaacataaattgtagaagagaacagtgattccctgttgtattgctgtcagtgtcagaggtgagcgtgatgaggtctttgccaccgtcggggactctgtcccctcctccctgctgcaccccggcaccgaccgtcctaggccctcaacacgcattcgtcagatccacttgactcagcctttgactcctggctaccatggaactgacacaagactgatgtcgtgttttaggtcaggggtcagaactgtgacctgtgggccaagtccagtcaccagtcttataaagttttattggaacacagccacgcccatttgtttacatattatctggggctgctttggcactataggggcagcggcctcgtggcctgcaaagcctgaaatatttgctatgtggcctttacaggacaagtttgccacccacccatgaaccagatgctaatgaatggcgtcctccccctgcctggacgaggagctggtgcgactctgaccactgccagccctgccctggccagactcaccgatccatcgccccttctccatgttccccagggcagtgtggctccttggtgggaacctgcctagggggagggacccatttgctatcaggactcattcctcagctgtgatcttctatgacaggtctcaggctggtgtcagcgatggggacccactgcagaaacaccctgggctgggctcagggacggcgtgcagcaggtactctgtaatccatgtgtgtttctggccctggggacttgggtcccgggcaccctctcctggctgtgcagcaggggtcctggcccagaaggaggcccagcagctctgaggatccaagccccagatttcttgccaagcccctcaggcaggtctcccctgtctgcagggcctctgagccctaactgctctcactctgcgcgggccgggggtcccagccctcatcagctctccaggttctctacttctctgccatcccttccccacagcttcccttcccaatgtcatctctgtgccctgcttctttggattaatgcctcaccggggccacttggctgtcaacattcatttgacaaacagagttgagcgcctgctgtgtgccaggtgccctgctgggctcgggggctcagtgggaataagatgcagccactgtcttcctcgagatctgagctcactgcaggggcaggtgagccagtggctgcagtgcagcgtgtgtgtgagagagtgtgtatgagtgtgagagtgagtgtgtgagtgtgcgtgtgcatgtgagtgtgtgactgtgtgagtgagagtgtgtgagtgtgcgtgtgcatgtgtgtgactgtgagagtgagtgtgtgtgagactgcatgtgtgagtgtgtgagcatgtgtgtgtgtagagtgtgcatgtgagtgtgtgtgactgtacattgcgtgtgagtgtgtgtgtgtgtgtagagtgggggtggggctgaaagctccagaacgagaggacccaggggaggggaggagggatagggcatctgtggcgaaggcacagcacacctgaggctgggcaggtgggcggggcctgccatggctcctcactgaggttttggagcctctctgcctcataactgttgtctcggcctctgctgtgactttgagctctatgggggctcagccctcacctgaagtgccttgccactccttgctgcccaggcatcccggaggaactgctgtggaccctgctctgtgcccaggtggaggagggtcaggggagtcagggcccactggggtaaatcttcatccaacaggagacgggaggatgccgcctcccatcaaatcctcctcctttcccgcctccagatgggccatcctcagggagtcgccatacacagggtggctcatgtctcagtttgcctgggacaatcccaggttatacctgtcaccttggtgtcattaacagcgagtgtcccagatgatgagatgaaggatgtgttcaccctgcaccctcatgtgtgcccctgacatccagcaactggtttgccgtgaagtggtggctgcctcttccctcccttcctctggctcctggcccacactccctagccccagagggtcacctgtgtctgggcctcaggctctgtttctcgggaactgaggccggagcctttgaaggtgtgaggaacgggagtgtcgcaagcacgtctgggttctagggacagaccagtttcaactcacggaaggacacccacagggagctgtgatgcagaaatcaagggagaataattggcccagactgctggggaggggctttctgaggagtggacatatagggagatttggggaaagaattggcaggagagggggccatgagtcgtccaggcagggggtggcacaggcagagtctccggtagaaacggctgaattccaagatttggggaaatcccagaaagaattcctgcccctctgtttcttctcagcccaaatcctgtagagccccttgtcagtggcagataaagtggggaagcaaatcctaggaaaggcgtccaggtaaaacaacggaagaaaggccataagaagcactgcactaccgggaccatttcatccacccgcactttgccatgaaagactccatccatggggcggggaagcaccctctgatcactgcagctgcagcggggagagcaagaaggacacacactgagggagaaactggaacagaaacagagagaggagagaacagagagagtcagaaacagaaaccaaagctgatggaaacaaaggcagcaggagagagggagtggggagagagagagagaatggatggacagatggatgaatggatggatggatggatggatgcatggaggatagatagatcagagatgaatggatgatggatggatgagtagatgggtgggtaagtggatggacggatggatgatgggtagaggatggatagatcaaggatgaatggatgatggttggatggaagatggatggaaggatgctggatggatggataatggatgggaaatagatgatggacggacgatgggcagattccagcaagcacccttatcttgctgtatcagttgtaagggaactggttcacagcattggcttctggggccccatgacctcctgtttctttccctacccaacccctgccttcttctcacacaagttgtaaggtgtagagcctgttcccaaaccaaacactgcagctttcttgactcagtgttcttcctgtaagattttttctccccccaacttccagagttgcttgctggggtgggaagggttgacagattacttctaagcatctggcacacggtagaccctcaaccaggtggctgtattgatgactttttttttaattgagatataatttatgtagtctaaattcaccattttaaagcatacaattcagtggtttttagtatattcacaaggctgtgtaactatcatatactatctgattccacagcattttcaccaccccataaagaaaaccattaagcagtcactccccatcctccccttccccagcccttggcaaccattaagctactttatgtttctttggattggcgctttctgcacatttcatgtaagtggtgtcattcacgatatagacttttatgatttttttttcacttagcacaatctttccaaggtttatctgtgttgtagtgtggatcagtacatcattcctttttattgtcaaataatattccattgtatgggtatacatccggccctccaaatttgctgattccacatccgtggaattcaaccaactgcagattgaaaatatttttgaaagaaagggatggagtatctgtactgaacatgtacagactcttttttcttgtcattattttataaacaatacagcataatgactatttacattgtatcaggtattataagtaatccagagatgatttaaagcaagcttgtccaaagggcagcccgtgggccacatgtgacccaggacagctttgaatgcagcccaacacaaattcataaacttccctaaaacattatgaaaggttttttttttcaatttctttttagctcatcagatatcgttagtgtattttgtgtatggcccaagaccattcttcttccaatgcggtccagggaagccaaaagattggatatccctgatttaatggatacaagaggatgtatgtagcttataagcaagtagtacactatttcatataaagaaattgagcatctgtggattttggtatccctgggtgttctgtaatcaaccccccatgggtactgagggactagggtactacccctgactttttcattagctgacagatatttgagttgcttccactttttgactattatggtgaatgctgctatgaacagccatgcacttgcttttctggggaaaaatatttccagttctcttgagtacatacctggaagtggaattgctcggtcatatggcaacttgatgtttagcttttcgaggaattgctagactgtttcccaaggcagctgcaccattttacatgctgacgatttgtttttaacaatttatggatagtcccacaatgtgtcaaagacggttcaaagcagcttagacccacacctgaattcagcaggtgactgtcagagaagtgagaagcatcggggcaaggacggggaattgggacaggaccagggagtggggagagcagagtcctgcccggcacaggccatagctcttcacaggaggctctgggccatgctgcagggtgggtaccctggggtgctcggaagtggcccttgaagcccctgggtacacaccgtgcatcttccagagcattgatttttacttaactgtttggtgagaaagtgatgtgtatgaaaagaatatagacacatgttgactagaatgaaaaactggatgaattttagaaagctcaaagggatccagcacctgcatgcctccgctgcaggctcctttgaccacagcccccacatcagagaacccctagcaggggcacctcccacccaccagaattggggagagttgggcaggctcgcctgcacccgtcctagtggccactagagggcgtctggatcctccctgggttgcagattccaggaaataaatacccaaggtttctgcccgcttctccccagtgctgccggcagagctgatccagaaacccaccccgggcttcccagggggaagtggaccgctcagactcctaacttcagtcagcacgctgacgaaggagagagcggttgagaatcctacagctggaggcagagctccgccgagggtctggccttgcaaggcgtctcccacagcccgggggaccttggacctgtgtcccctcctacaagatgctgagaagcccagggttaggggtccctgaggcagggtggaaacgctgccaggacaagcccagcccacagtccacagcgcctgccccagaaaaaacagccgtcgctcctggatatctgccacgtgactcaaagaggatttaaggcagtttagagcgattcacaaaattcagcagcagctgcgacctcggggacccagagagacggggatgacgcaaggagaaaggaacaagagcagggatgcgggatggagcctgggatgaggggatgcaggccgctcacggagaattcttctggggtcaggcccaggtctgggtgtcttgcgtcctggggcccccggggtgcagcccaggggctgcttagaggggctgagtgtcttctcctctagggtcagtgcccctggaagatttggagggaaaatttgtgtgtgtggagagaaggcaaacgtgtcattgatttttattataaaagaaaagactgtactgcactgtactggaatgataatgatgaagaagatgggatcattccagtcactctgagtaacttacagtggctttttttaaaaggaggatttctttcctttattttagtttattttttaattatgtgtttatgatttttagtgatggggttttgctctgctgcccaggctgaagtgcagtggcatgtcatggctcactgcagcctcaaactcctgggctcgagcaatcctcctgagtagctgggaccacagccttgcgccaccaaacccaactactttttaaattttttgtagagatgaggtctcgctatgttgcccagactggtcttgaactcctggcttcaagcgagttgaagcttgaagcctcctgagcagctggggttataggcataagccaccctttccttttttttaaaaaaaaataattatttgaggtgatatttgtgtaataccaaattagcccttttaaagtgaacaattcagtggcatttaggacattcacaatgctgtgcgcccactacttctacctgttccaaaccattttcatcattttatggtaaaacctcatctttgtggtgccttttagatctttctttattaattatttattgagcatctaccatgaaccgaagtctgtgtggtactggggattttgaatggtgattacacacagtctctgccctcagtgatagccagcctttaccccaacatgttctttaagtgttctagctcttagaagcagagtcctcatttcctcccagacagcagaaagattggtaactatgtagcacccatgccccactctgctggcccttgcccttatcagacattgccaatcaattgcagcactcttactgatccttgaggcagcctagtgaccctgtggagctcaggtacattgccaaccaacactgagaaagctttgggtcattccgagctgtgatgttgtacacacagaggtctgtatcatatatacatacactgggttccatgaactcaagtctcacttgtccacaagttgcagggcaaccgggttttataggcttacaggaaatcacccctagtcctcactccatgcctgcagggaaaacgttgtgaaggtatcctagctggttcctgcgggtcataaggatgctgaagaaactcccagcatagacagatacagtgaacctggcaagtcactgctgttgggttggtgtgtgtccagggaggtcactcacagccatgacctgctacggaatttgccaggggtctaatgcaaatgaaagtacagttcccttattcaaaaattatgaagagctgcaaggtggtggtggtagggcgggaagccaagtctgggcccttttgagcctggggccctgtgcctgtccaggcagctctcatcgcagtcattctggccatttacccccactcgggctctgcatgaggagctggcctggcctggaagcgcagtgtcgtggagagcctggtgtctgctctgccccaagctctccccctttctaggcagctgcaccaaagcagcttttggagaacctcctctccccaggcctcagcagaggaggttcaggtgagctgatcctaccccacttccatcctcctccgtgccaccagcctggctaacccgtagttcccatcccttagtgacgaggaccagttcagagttggggagaggtgctgtgaggaggtccaagcaaactcggcttggtgctttctctggagctccaaggaaggaggtggccccttgaagctttggtagtggaactctcggattcagccatgtctgtcaccacccctcctcctggtctctccagtggccaaggggtaccttttctgctccagccagaaggacttggatttcagcccattggaactgaaagagtccctggagtgagtggggctcaaacgtggggctaggtggcttagccaagtggatgccccactgcacgtggctgcaggaaagaccaataccccttgtccctcatggcccttgctgtgtcctagacttcagccctacagccgagggggatcctctcagcaggactcctgctggtctgtgttcccatggcccagaccaacccatggacattcaggacaccctggagggtcctcacaaagaagggatgttacccacagggctggccctgagggtcctgctgggcccaagggagcagctgatggggtggccttcagcccttctggattccttgcaggggctgggcctggccagcctgtcctctgccctagaagcacccaggggtgatgtggctctggtgaagcgcacaggtcctggagtccagttacgaggcctggagcttggcttgtcctaatattagcagcagggcctcggggagcctctgagagcttcagttttcttagggataatgaataatgctgtctttagatttttgtgaagatgaactgggataaagcagatggagtgtttagcacaggtcctggcgcatcggaagtgtttagtgaggatgaatgattaggcttcatcttcccctctgcatcctcttctgaagaaacctgctcagagttcaaaaggcccaacccaggccacacctaaggaggccaacagtgtctgctggcctcagacggggttagtcagcgtccttggtagtgtgtacttgagagggctgccatgtgaagccccattctgtaggtcaccaatagatccatgtgcaaacagatcaggggccacgaaggctctggcccgtggacaggcggcagggccggcagaaagagagacctttcctagcacacctcgaatttgtcttcatgctaacatttctgtctcctaactctttcctccagtgacctcttccccaccaaggctagggagaaaaggaaatggcaaggagggtgggactgaaaattccagtcctccatagggctgccttcgggcacagctggaaccagctgctcacacggacaatgccagcagcccctgatacctccctgtccaggctcctccctcttctgtgttcttttgattctgagccatgtaatggccctggacgttcagaccatccttctcaggactagtggataacatgggcttctctctcccagtccagcaaagtcccaaatgtgtgcctctgtgaaccaacttttctggcccagcccctgaggtcaggtggatgatctatgctggttggttggactaggtcatgagccctcccctggaattagggaggggccctgggtccacagagtggggaaggaggcttccagcaggaaatggaaatgctattcccagcagagtgggacaaagcctgcaaaacacatggtccctgagtgaccaggaccaatgcctgtcctctcaaattccagcccagtgtggggcagggcagatgggtggacaaatcatctcaatgggatgcagtgtatggccaacagagtgtgcacccagtgcagggggcctgcggaagggagagccaaaggcctggggaagacaggcagggagactgaaggattaaagtcttcagaaaagaggcaaacacttaagccaggtcttgaaggttgggtaggagttcaccagggcaaaccaatgagctgggcacagagctaggaagcaccgcaacactggccaggtgttgaatccagacgctgcacctttctcactttctaggcaagtaacttcacttctctgagcctcagtttcctcctctagaaaggagggcatgatgatagtgcctctctccaggagctgatggaggagcaaacaggatgaagtaggaggggattggagcagtggactcagtttcatctttcatggagcttgcattttctcatccataaagtgggcacagtaacagcgccctcctcagtgagttttctaaaggttcagggaatgtatgctcagcgcagtgccaccacgtgctggctgccgactgttaccaccgttaagcagttctgaagatgaggctgagaagtctgggcgggagacgcgggaagcaggcaggctgccagggaggaggcaggtggctgggaggcctggctacatcccaatcccagcactgccctggccgctgtgtggcccactgattgcacctgctgggggagccgctgggggatggaacgggggttcctagtccctcagcagagtgcactttgaaagccttcagtggtggaggaggggagtggtgttcctttggggctctgaggacctgagtgtcaggaggaaggttacccggaactctgctggggacgtggctgtgtgggtgctgatggggaccctgagtccatctcaggccaggatcctgcctcaagggcagggctgtggctacaaaaaccccaaagtcagtagaggctgctgaggcctctggagagtcaccccaaccccttcaggcccaggtgctggtgggtggacgggcgttttgtgagagggcgctgggagggtcagaggacggggccggcacagttctagttctggagctggttggtggttacaaaggtgtcccccaggcagcactcattaagctaaatacgaatgttttgtttcatagcaaaaaaggtaaatatatggggtttattcgaaaggcagcagtgcctcccaccgcccttacattaaaggcagccaaggagtctccaacttagggagcgccaggcccggctcagtctcggcccatcccacttcagccccagcccattttacacaccagaccactgaggctcagagaggccaagcgactcgcccgccgccccacagcggctccagcgctgctgcctgtttacagcgcggggaaccggcggctacacctcccgcccggctgtccctttaacgtttctagggcatccctggaaggcccgggcacggcgctgaggtctccgctcccgctcccgctcgcccgggcgaggctgcggctccgggcgggtcaaggtcgcagcggagcccctcggagcccccgcccggcggagaggccggcctcgcgtggcggcgccgcccccggccctggtcccggtcccgccccgccggcgcctccccgcggccccggctccgctccgcggccctccggcgggatgcgtggccgtggcggggggcgcgcccgctgtcctgcgcccctgcgctcgctgctgggcgccttcggggcccgggacgctgccgccgccgcccgagatcctgcgcaaggtaagcgcgcgctgcggggaggggacgcgggacgtggggcccggggtgcccgccgggcacgaggcgctgggggacgactcctcctgaatcccttgcccttggccgttgcgggtggccgggaggcccgctgcgcccccagccacagaggtgggcgccccgggtctcgggcttaccgcccccctcctccccctcgcagcaaagtcaccagagtctctccctaaacaagggcagtgtccgcagggtcagaagcgctggcgttggggtcgacagtctggggtttggaattcccctctgcccgctgtatgagcctgtgcgcatggcgtttgaccttgctgcgcctcagtttctgcatctgtgaaatgggggatacctgtgtcttgggggcagcagttgggatcgtatggacagcgctggccacccaagggagggctctgtgcttgatcgcccttcttccccagggagggccatgggcctccacccacgtgggactggcccctcgccccctgctgggcagacacctgaccctggagagggtccagctgcagttcaagggatgggatctaggaagaggggcctgaggaatccagaaaatggccagggccccagctgggccagggaagaggagttgaggacggggagtggcctcaggcctcctggtgacaaggctagagttttgcctgtgctcagtggccatgggtgcatgagtaccaggtgtccagcaggcagagcccggagtggggtggaggagagctaggccagtgtttccgcactggcccttggtgaggataccgggggcacttattacagattgttccaggggccccacccaggcctgccccttgcaatctcctgggagaatctgtgtttttaaccaaagcaccaggaaactctggtttagatccatccgtggttcttttcagtgcctcgaaacgggttgatcctgccttcccttgaagacatttctggttgtcacacctgggggaacgccactggcacccagtgggcagaagccggggacactgctaagcatcccgcactgccaggagccctccttccccacgaggcggtcatggtgtagtccacaggctagtgctggggttgggaaaccctgagatacagggatacatggagtcacaaagtcaagaaaggaggacatggggatttgggggacacttgagagcccgctatctgccaggccttctgtggtgcccttggaggagaagctcgtggcagaagctgagctcaggcacagaggatgggcagctgaatccactcatcaggaatattgagcccctactgagcgccagtcccagtgctgagctcccagggtggagtcgggagagggagatgaggcccctctagggtgctcccctctaatggggcagaagcccctcccccagtgcctgcacagagtaagtgcccacaagtgtcagtgccctcccctaaagcacccctgtttttggcagtgcatgagtactaagaacagtggggcatattctgggttggattttgggaaagggcgttcccagtcctaaccttcggcagcttggcagtgtgttcagggccaccaggagcccatgttctgcctgcagtaattacgcaactcctcacctgttccttgtgctcctcagtcgctgggcatttttaaaatagttctgcggcctctgtctaggccttgatggatggatggcagggctcagccactgctgacccactttccccaaggagaaagcggaatattttgtcagtgggtcagcaaatgattattcatcattgaaaatgcttcaggcactgatctagatgctgggatgctgcggggagcagggaggccctgaggtgagaattcacttgatggcactggggaataggagggtccttgaggctggaagcccatcagctaggggactggagggagctgagtttggggaggtggcccatgggccttggcctccatcagaagtccctaggggttctacatgtgcaacccgaggccaatggcaggttctaggctgaagaattgcatgtccctctgtgtctgagagaaagctcctcatggctgctgtgtggccgcaggtttatttggaggctatggcagcagagttgccagctgcttggaggacaggagggtccatcagagacggagaaagtgggaagcactgggggctgataggacctgctcatgacttgggtaccccaaatccaggatgccctgtaggtttggggtctgagcactgggtggatggtggtgctgtttatgggggtgtggaaggcttggtcggggaggagggagactggccggaggcttctgcagtgcattccttcactttccgtgggagaggggaggtctgggagaggaagcgcgcattccgtgctgaccatggtgatttggaggggctgtttacactgggccattgcacgtctgagtctggagcttggggcggtggttgttctggaggctccaatctgagattcatcagaatggggctggcacttaaaggaggtcacttgggagggggctgaggcagagagtgtggctgggtttcttggtttcaatgttgcatttcaatgttgagtcagataggaccccagtgcaaatgccaagttttgggttggagcaagggtcccggcacccaaggaagaaccaggctgtgtgcccacaactctttgggcactgtgatgccagacctcaagaaggtccctttgacttcattccttttggaaccaggaggatctgtccagctgccacctgaagctcagcttccatgatttgtgtggctacttcccggagcttgcttgggaatcttaactctcacccttaaagggataatgtgctatttctggggccagggctgcattaatttaggaacaaattaaccactcattcttccagacttcgaagtctgatttcgaagtgctgactcgtagtgggttatttctgcactaaatgagttttttttttttcctttaaaatttttgtttgaagggaaaggcgtgatcaatgatatcatgacatgtcccagctgatgctcattaaaagttgtggctttaggggctgcaaaagacagtttgaaatttaatgccttgtttcctggctcagctcagagtcggggctgggcaaggctccctggaggctataactctgaagacccagattgggtctggagttgcccaattcttttgaaatcttaatgacaaccagctggacttagcaggcttttctggtagcaagtgactgaaatggactagacacacagaagcaaaagggccatctgttaattcaggaaactgggcgtctgtagctccagctagcctctccttgtctgtcccagactcagggtgggtcatatagctggcccttgaaccacttactggagtgagggagtggggaggactggacggctgagacctagctgtctcctccggtccagaaatggagctggcatccccgccatagccagcctgagacttccagtaggaaatcaggaggatcgcagaaggacatgggtactgggggtcacaaacgccagcatggcagtgcaagaaccccacagctgtgcccacctgacctgcaaaacctgccgtgcattgcaaatcacactgcagccttcagttttctttcctgtgaccaatgggtgcttggaggcaaaaggcagagtcatgatgtcccggcagctcgagaaggccctgggagaggtgtgacctggctacacatcttcgtttctctcctttccccccagggtgctcagggcacacctgtgagagccaagcacctccccacagccagtggcccctcaggtctgcttctccttcacctgctccaagcctcacatttttctcaccacttagtccaaatccccacgcagctgtcaccccattactttaaggactgctgtctgctggtgaactttgctgatgactaagttgatcgctccgtttttgtttgaagggaaaggagtgatccccaatctttagaaatggcctaggctggacgtggtggctcacgcctgtaatccaaacactatgggaggctgaggccagcagatcacgaggtcaggagatcgagaccatcctggctaacacggtgaaatcccgtctctactaaaaatgcaaaaaattagctgggagtggtggcaggtgcctgtagtcccagctacttgggaggctgaggcaggagaaaggcgtgaacccggtaggcggagcttgcagtgagacgacattgctccactgcactccagcctgggtgacaaagcgagactccgtctcaaaaaaaaaaaaaaaagtcctagcctgtagttgggactccataaatattttatgggatgaatggataatgtggtctccagctcaggggataagtttttctggaaaaaaaattactcactcaaacacatacacgtatatatttaattacactagtatgtcatgaatacatcctccaagtgagcaattgaaaacattgcaaataaggctcaaatccctctggaacatgaatcctccccccgcccgccacctttcgcccttccccagggaagccactgttaccattcatggcatttcccaccaaactttcttgacataagcatgtgctttttaaagaaatggcatcacacagcacttctcgctgtgaagctgttttcactctgcagtgtatcttggagatttatctggcttcataggttctgtctaattgctttagaatattccatggctgttttcgcctttctgctaccgatggccatggaggtccctctcagatcctgtcacaggctgtgctgcaggggacaacctgcgtgaggcactgagcacgtctgtacaagtgtttctctataaggcacatccgaagaatggaactcctggggcttaggatgagtgcattttaaatttaagctgctattgccagactgtttcccaaagtggctgtgtcactcccaacagcagtgtcggaggtacccgtttctctcgccagcacttgatacattcacattctgaaattttgccaatcctccagagaagtgaaaattacattgttcaatttgcattgccttgattgcttgagagtttttcttatgtgacttggccatttggatttcactctctgagcgttgcctcttcatttactttttgccctctttttccaggggggtcgttcgtgtgtttccgagtggtttgtgagcgccgtcgatctgatctggaacccgatcctccgctggctgcaaatattcgtgtcctgtctgttgtgtgtcttttcactttgtttatggtgtccttggttgatagaagcttttagttctgatgtggtaaaatgtatccagctttttttttgtttttgctttttgtgtcttaagaaaccctcttctgcctcgagtttagagtgaacagtttttctcagtgtggcagggagggtcctggttttagctctgaaagtcctgcatcctgagaagtcctcagccgggggcataccaggatggctgctcaaaaacacatccctctgcgtctccttttgaggcttgtatagctttttctttgcatttatttttcttatctactataacgtgtgtgaaagaacagtatgaggtagaatgcagggttttaataaggattacaggagtcactgggtttaacccagggatctgttgattctggtggggattcctagccctgagggagcagagggaggaaaggtggtctgggggtggggacagatccagtcaatttactttacccctaactgtgaagtggaccatggcttccaaaccaaaactcagagcagattttgggcaaaaattggtctgatctggtagcctacatggttttattaatacgattgacaattggctgtacatttcccaagcagggaccagctgtgtggagaaatttggatgctccttctcgcagcctggctgctttcccagggccggccccaggagggaggctccccgcgtgcccgcctacgcaagcagcctcggactgactcccaacaaccccagggtgctggctttcccggaaccctcctctgattcgggatttctaccagacttcggtagcggtttattttaaggaaaacaacaacggtacacttcccttgcataggactcctagcctgggccggggctggctgggatgaggggatgggaggaccgggggtctggcccagggtttgcgttgtgggctttgcattgggcagggggagttgccctttggaagctggtgaccttgtggcctagatgacctggagcaatgtcgattttgcgtgattacagtattttcaggaaagctacttaggtgcaccagtcaccagggacggttcacgcgtggacatgtggaaggcctttcctggagggaattcagcagctcttgggcctcacactacgaagtgggccagaccggtgggctcgctatggaaggttcctgcaccaggcattttagtgacaaactgtgggtcaaaggaaacacaagtgagcgcgtgggcaagaaggtgtcgtactggtgcccgtgtgtgcaacggggcagccctgactcagtgcctcagtgcctcagtgccttgggtggtgcccttaaggacaagtgtgtgtgaacgtgcatgagagtgtgaggatgtacatgagtgcgtgtgcctgtgtgtgcctgattgtgtgtgtgtatgcatgtgtttgtgaggccgtgcaagagtgtgtacgtgcctgtgtgtgactgtgtgtgtgagggtgtgaagctgtgatgagtgcatgtgcctgtgtgtgcgtgattgtgtgtgtgcgtgtgagggttgaggctgtgcaggagtgtgcgtgcctgtgtgtgtatgcatgtgtgtgagggtgtgaagccgtgcaggagtgtgtgtgaaggtgtgcgtgagtgtgtatatgagcaagtgtgtgcatgaatattacatgcatgagtgtgtgcatgcacaagtgtgtgcatgagtgtgtacgtgcatgagtgtatgtgtgcatgtatatatggatgcgatctccctcaacctagtgtgccagcctcagcacagccctgctctgaccagaggcttaggaggtcctccagctcccagcccctaacactccatctaagccaggcctccaccttcactccccggccttcacccgtgctgctccttctgacggaaggctcctggcctcccgtggagtgtacccatctgtcaaggcccagcagcgagacctcgtctgtgaagcctctcaccccctattccggggggatcttttccccctgtaagctcttattgtccaaatctcttcttcatataaggacaccagtcagattggattgcccagcccccaccccctcagcagcctcattttaatgtaatcacccctttaaaaaacgccttctccaaatattgcattctgagacactggggatcaaaacttcaacatatacatattagggggagtacagttcagcccctgacagcttggctgggaacgtgagcggggcctcgggtcctttccactcgggcttttgcataggcagcttgaggtggagaagtgagcaacccgagagaaacagactcaagttctgtcaccgcttatgatctggctttggacatcacagtcccacttctgccttagaatcggccttccctgactcggggtcggcatgaacccacctctcagtgggagggtgcaaagccacgttgcaagaagaacatatgaggttggaggtgatgttgtggccatttttggggaaaatcccccaaaatgtgactgcactgggagggactctcagatgcttgtgcctggtttctggcagatttcgacccaggcacgtttttctttgctgggtgtgctttgcctgctgctgctataaatcacagttgtgagtacagctacagccgagtcctgtgagtcctctagtgaatcactcaaactgggggtggtcctggggacccccagcacagtaatcaccctgttcactctcttgttaatgatccatctgctccaccaaaggtaaacccagggcagcagtgactggcgcatttttgtgtgcagggcatgcactccgtgcctggcacctagcaggtgtgctgtaagctctgtgtccaatggagagcatgatggggaggcgatggtggggaggtggggttggtggcagggaggcctcctctcctcacccgcgtgcagaggcccttgcggctcacaggagttcctttaagtactgtcgctctgacattgagcttttcacctctccctaaaggaaagccatttagcaaaaagaatctcctaatttagcaacattatctctgtcaagttacaggaagtgggcatgtggcctctttgcgtgagtctctcagcggtggaagctggctcttcctcctgaaaacatgtcgtatttttagaccgtcttgaatgatttacacaccttttctacaagcagacctggagatgggaatgcgcaggcctgcccggacatcttctccaatacccaccctatgtgttcgtgctgtcacctgacaggtgcccttggtagcccttctccatccaagcctccctccaggtggcctgccctggcctgctctgtggtcattctgcctcctggaggccggcacagacttcctgcctcctgcacattgcacatttggacctaagttcattgccactcccccagagggcaaacactaaaaatagactcttcactggatgaggtttctaatataagctaaggactgtgtctctccacttacgagtgtccgaaacagctgtatgaactgcacattctccgtcttccatgactaaatccccttaacgaccctaattcactctaattccagtaacaaggacgctccagcactggaggcttggtgcatgttcgatttctatttttattttaatggctttgctatctgtgccttttcctataatccatgacaaatcatgataaattaactccatttttttttttactgtttggttaaacattgggatgataaaaaataaggcgatattcctcttatttgtagattactgtgatttctgacctagagtattgtggtcacgggtgaaagtgcagaatattgtacactgatcatttgcgtttgcttgggagtcactgcagtgggggattggagaggagccactctgcagtcactggacagtgatagtcacaccagccaggtcctgtcctcagtcctgctcactcatctacacatctctgtgggagatgagctccacttggtgggaccccatttgacaggtgaggaaaaccgaggctgaaagggacagagtaacgtgcccaaggtcacagctgctgagccgaatttgagcctggacagtctgctggattcttggtcgttctgtgatcctgtctctcatgaacctggatttatattatatcccattggttctggaaagtgtctgacagcaggtcaatgcttgttgttactgcctgctttggaagcccttaaaagatgccccaactctggctgtccttgtggggtgcctgtcttggaaatgagcaggctgctgactgaaaagagcctttccctgtaggtgggatgtggtgccccacaggtgggaccccgtgtgccctacaggtggacactgggatggttctctccacctgtcctcatctgtggcttcttccctttgttagagtcttgagttgatgttggatatgagcgcacctttcttccgaggatcgtctaagcagggtggaggagatgcaggttgcacagaggtgggagaaggacccttggggccaggaggcagatgtggggtgtccccagctctgccccgagtcccagtgtgaccttgtacatgttcacccttctctgagcctggctttcctcgtggatggagtgtaattctgaaacccagtgttcatggctggtcaggaggatcacaggagagatgtctattgctgccagaacaatttaccaccaactcagcagctaaagcatcaccgatttattgccacacacagcctgtgggtcaggggtgcaggtgggcttacctgcttccctctctgggtctcagcagcgctgtgctgtttgccagatgctctgggagagaattcacttcctgctcgttctggtggttgtcagaattcagttccttgaggctgtaggactgaggtccctattttcttgctggctgtcagctggagctggggctggagccggggctggggctggggctggggcctgggcccgggtcattttggttctcagctgtagaggccactgccttccctggctcacgtctaccttcaaggccagcaagggtggctgaatcctctcagccttcaaatctctcctccctcccttccaccctgtccactcctgccttcccctctgcttcctgagtgattccatgaggcccatcgggtcttccaggttcatctccatatcttcaggtctcctgattataaccctgatcccagctgcaaaggccttcacattggtgcctgcattggtgcttgatcaggtcaccgggggtcgggagtcctgagggaatgaatggctctcaaattctgctgtccttactgtgggtaagtggctgagggctgcttggaggaacctcacagtaaaacagacaacctctcacttaaacagcacataaactcatatgtgaggctctgatttgtagcagtaatagtgcacaggaagttttttcatttattacagatttagctgcagggtgcttttgataaaaagacccggttgaatatagttaaaacaaatctgggatccgcccccttgctgagcatttctgtcgcccctgtcccagtccaggctgccccatctctccctgtccgatgcagcagccccgtccccctggtccctggggccatctctgctgtcgtccactttatcctctatctggcggccccaacacccttccaggagaggtcaatctgctctcagctcttcctggctgaagaccctcctgggtttcctgtttctcccaggataaaatccacgcttctactcatgctggggcaagaggccctttgagtcctgaggcctgtccccatcctcagcctcccgccatcttcccggtactgccccacccctcacccctggctgcttctcagcccctccagctgccctgtgcttgctagtcttgccctaccacctcccacccccgctccctggcctccatgcctggcacaggccctgtgctcagtgaatactggttgaatgagtggacacgtgaattaacgaatgagagactcaaatgatcaaatataaagcagggcctgtgtctcagggacactcctccagcctggcaagtctgtggtcttcaggcccgttgccgaatgaagggtctacttcccatctttgctgtgagtcccaggtttccaggggagcaggaagtgctaatgttctaatgtctgcaccttcacttccagctgctgatggccccccaggcccatccccaggaacagggaggctccctttatgccacagtgtatagactcacaggtcccccaaagtagcaattgaaaagaaccagcagggtccgtgaccgcaaactgcagcctgaagtaccagggtaatctttgttacaccccaagttgcgggacggcagagccctctgccaaatagagaagtgaatgttattctcccgtgggctttggaagacccttgcactattattaatatctcagggcgaaggccggtgagggcgccagaatttaattgcctaaataattgctttccccaaatgcgaaatcccgatggacccaccagcttcagtgtgcgcatgggttttaatgaatggtgggcgccgagagatcacagcttctgtgcaaacacggacggccgttactatttataggtttgtacaggttgattcttgggatcatcattgctacggctgcagaacgtaagatctatttttaaagcactacctataagcctagtgctatggattttctgtaatttatagctcgggctacgagactgcttttgaatggttactctgtaaagtacttaatctacagttgctgcgacggggtgctggtggcatgaatctgtgctgtggtgagtccgtaagcccagctccacggactctgctgggaaaagaaacaactctcttaagtatataaatccagtaaacataggaaacgtccacattgaactggcagaaggagaacatgtttgggtgacaaggggcattatttaaacatgaaagatcttcctttaaaagtgaaagaaaagaagtaaacactaatagtgtgcacaacagtgccaattctagaagagggtatggatttgctcttttatttattattaacattctaacgatccaagtatttcatgatctccgcctcctggcaaaaatgaaagcattttgagtagggagctcagacagccgccgtcgtggagtctaggctcttccctccgcttctgtaggcagctgtttcaccacggagggcagagatgcccagaacatccgccctgtgcttccatagtcatatgtgtctgtgggaaatatatggtactggtgagtgtgtgcactcacgtgtgcatgtgtgtgcgtgcttgtgagtgtgtgctccatgagtgattatggcattgttatgttatgtactaacccaggaaataagagctccaatgatgttagactacaaagatcttttgcagtacaaggaagccgctgagtgctattccctagtgtggatataccgtagggcagccattctgctttgagggacatttaggttgtttccacttgatcggcctcatgcataccttcctgtgtttggggtttctctggagtagatgacaagaactggatgagctgggacaggacattttctatttgggcagatgcagccagtcatcctggttgccggtttcagtcccacccagcattcgtggtgcctgtttcaccacatcttcaccagcacttggtgttagactttcaactttgcctgtttgtttgtttattcttttcttcactggggtcaggggctaaagcctggtggttaagaaggaggcctgaggggacagatccacgccagccctcctgctccctggatctgtggcctcaaggagctctactggttcctgtcttagactttttgggctacaacaacaaaatatcttagatggataatttagaaacagcagaaatttattgctcactgttctgcagcctgcgaagtccaagatcaaggggccggcagatttgctgtctggtgagtgccggttcctcagagatggttccttgctgctacatcctcacaagcaaaaggtgtgcacaggggctccctggaccctcttttataaggcacttatcattgatgagggtggggccctcatgacctaatcaccatcatctctgagcgctgcgctgtcctgtgcaggacccatgtcccatatgtggctgttgaaatttattttaatgttaaatgaactaaaatgagatgaaattaaaaattcaggtcctctgcagcatgcaccacattttaagcactctcaacacttgtggcttccatgatgggcagtgccacgtacatcatcttcattctcgtagaatattctagcgcatggtgcagcgccagggatgaggcagcctccccagcaatttgcaccagccccagcctgcccttgacagggctctggccattctcgtccctcgcacggacacatctcatcctctccgaaggcacctgctcctccctccaggctgagccatcagagtccctcccacggggccccagtgcttcagttccccacttccagtggctcccgtcagcatccacttcacaggtctccacccgggcaaggctcctcactcatctcccagctctggccttggcctccacatcttcctgagtgacaccatgcggggaacttggtgggtattttagggtacagatgaggaaactgaggcctcaggaagacagctgaggtgtttttgggtgaggtggaccagggaccgctttgtggcaccagcaactccagctcctcatcatgggggccagggcaaattcctttctttaggggattctgccttctttttcccacagtgcagtgccactgggggagatctcatggctggtctcacccgttgagacccattgagatccattgagactccatttctgcaaagctctccagacccttcgcccatggccttgggaaaactgtgaatgttaaagggccaagagtgtcaccgcagaaaccatgtggctccccgcagcagggccaaggcgtctgttactttattttgtgttgtttttctataaagtgatagatatatatggtaaaaatataaagaatacagtaggatgtaaggcaaaaatcagcttctctcgcccctcaactctccaggcctctgggtcttctctggctgctcccagagaagtgccgtggctctaagaggtcaccagtgttgcctctgaatccttctggaaagtctacataaaacttttgtgcacggcttttgaaatacacatacacacacacagacacaacattcccattctgtgtatgctcccgcacaccttgatatttctattaacagtgtatcacagcagctgctgtctatcagcctacaaatgtcttccaagcagaacccatctcagggcctttgtgtgtgctgtttcccacgcctggcatgctctttccttagagagccctgtgcctatggctgcttcccttattccactccggcctttgcaccagtatttctaaaccatgacctttctttctaagaccagtgttaggttcacagcaaaactgagaggaaggtacaggaatattccatagacccccgtcccaacatacatagctccacacattatcaacatcccccaccagagcagtacatctgttacaactgatgcacctacatggacgcaggaagatcacccacagtccctggtttacattagggtgcattcttcgtgatgtacattcactcattctttagaccaattcattcatttttttaaagacaaaatgactaaattttcagaccgatttataatgacacctacccctcattatagtatcatacagatactgccctacaaatcctctgtgctctgcctagtcattcctctcttccttctctgcaacccctggcatccactcatctttttattgtctccataattttgcctttttcaagaacagcgtagagttggaatcacacagtgtgtggccttttcagattggtttctttcactgagcaatatgcatttacatttcctccatataatttcttggctttatagttcatttttttttgtactgaataatattccaatgtctggatctaccatagtttgtttgtctactcacctgctgaaggacatcttggttgcttccaaattttgacaattatgaataaagttgctataagaatccatgtacaggtttttgtgtagacatgagttttcgacttctttgtgtaaataccaaggaaggcaatgtctggatcgtgtggtaagagaatttttagttttgtaagaaaccacaaagctgtcttccaaagtagctgcaccattttgcattctcagcagcagtgaatgtgaatgagagttcctgttgctccacattctcgtcagcatttggtattgtcagtgttctggactttggccattctgatgggtgtgcagtggtctctcattgtggtttcagtttgcatttctctaatggcataatgtttggagcatcttctcatgtactacttagcatctgtaggttattttgatgggtgatctattcaggcttttggcccattttcaaatcaaattgttcattctcttgttgttgagtttcaagagttctctgtatattttggataacagtccttttttaggtgtcttttacaaatattttctcccagtcttcagcttctcttttcaatctcttgacagtgtctgtacaaagtagacttttttttttaatgaagtccagtatatcaattatttctttcaaggatgatgccataatattgcatctaaaatgtcctcacaaaacctaaggttttctagacttttctcctgtgttatcttctaggagttttacagttttatattttacatttagttctatgatatattttgaattaatttttgtgaagggtgtaaggcttatgtctagattcagttgcttttttgcatgtggatatccacttgtttgagaacatttgttgaaaagactttcttttctccattatattgtcttggatcctttgtcaaaaatcagttgactatatttatgtggatcaattcctgagctccctattcaattccactgatttatttggctgtttttctgccagtatcacactgtcttgattaatgtagctttatagtaagtcttaaagtcgggaatgccagtcttccaactttgttcttctccttcaacagcgtgttggggatgctaggccttttgcctctccatataaaccttagattcagtttgtgaatagtcacaactgattttgactgagattgcattgaatttacgggtcaaatagagaagaactgacatcttgacaatatccatgaacatggattctctctccatttatttggttctttgatttctttcatcagagttttgtcattttcctcaaatcttatacatattttgttaggtgtatacctaggtattttatttttgggggtgacttgctcattgctggtttatagaaagagattaacttctgtgtgttatccttgtatcttgcaaccttgctataataatttattagtttcaggaggctttttggtcgagtttttttttttttattttctacatagattttcatgtcatttgtgaacaaagacagttttatttcttccttcctaatctaggtactttttatttttccttttcctgtcttatggcattagttgaacttgaacaatgttgaacagacacacaatgttgaaaacctgtctgagttttgtcagattgtgtctttcaaggagtcggttcatttcatctaggtcatcaaatttgtggacatagaattgttcagagtattctgtcattatccttttaatgttcatgggatctgcaatgtgtgttccctctttcacttctgctattagtaacttgtgtcctctcacttattttcttagttaagctggctacagacttaacaattttattgatgtttttcaaagtaccagcttttggtttcattgattttctttattgattttctattttgaatttcattgagttatgctctaattttttattaattttgtatctgcttgctttggatttaatttgctcttctttttctagtttactaaggtagaaccttagataactgattttagatctttcttcttttctaggatataccttcagtgttataaatttcactctaaacattgttctcacagcacccacgaattttgataagttgtgttttatttttgtttagtccaaaatattttaaaatttcactcgagatttcttctttgacctatgtggcacatgaggtgtgttattcaatctccacattttgagattttccagttatctttttgttactaatttctagtttaatttcactgtggcctgagagcagatattgtataatttcttttaaatttgttaatgtgccgggcgtggtggctcacacctgtaataccagcactttgggaggccgagacgggtggatcacgaggtcaggagttcgagaccagcctgtccaatatggtgaaaccccatctctactaaaaaatacaaaacttagcccggcatggtggtgcacgcctgtagtcccggcgaatcgggcggttgaggcaggagaatggcttgaacctgggaggcagaggttgcagtgagccgagattgcgccactgcactccagcctctcaaaataaaaacaaaaatagtaaataaataaataatttgttaatgtgaattttgtgtcccagaatgtggtctatcctggtgaatatttcatgtgagcttgagaagaatgggtattctactgttgttggaggaagtggtttatagatgtctgttacatccagttgattgatggtgctgttgagttcaactctgtcgttactgattttctgcttgatgggtctgttcgtttctgatagacgggtattgcggtcaccaactttaatcatgcattcatccatttttttctttgaagttctgtcaatttttacctcatgtattttgacgtctgtcattaggtgtgtacgcgttaaggattattatgtctttttggagaattgactcctttatcgttatgtaatgccctttgttgtccctggtagcttctcttgctctgaagtctgctctgcctttcttctttacttttatttttttactcttaattgtaagatacctgttgaaaagtgcacataccataaacgttcatcttgatgaattttcaccaagtgaacacacctctgtaggcagaacgcagttcaagaagcagaatataacctggatcccaaagccgcctcgtgtcctctcttaacaaaacccctcctccatgggtagctattctctgcagtctaacatcatcaagtagtgttgtctggtttttatttttctttgttttcttttttcggacagagctcactctgttgcccaggctggagtgcagtggcatgatcttggatcactgcaacctccacctcctagattcaagcgattctcctggctcagtctcccaagtaaattactacaggcacacagcatcatgcctggctaatttttgtgtgtgtatatttttagtagagacaggctttcaccatgttgaccaggctggtcttgaacttcggacctcaagagatctgtccaccttggcctcccagagtgctgggtttataggcatgagccaccatgcctggccctggtactgaaccttctgtaaatggaataagatagaacacagtcttctttaacagaatattgtgatacctacccaggtttttgtctggttaatttcactgttgtatggtatttcattttgtgaatgtagctcaatttaatgcctgctcaaattcttaggttaaaaatttcaaaaacattttattgtctgataactatctttgatttggatgagttattctgcgtgtaacacctctggacattggcatgcatagcttgtgtgtctgctcagcaaattcctctgtgtccttccaagctctgctcagcagggcggtggtgtatttttgcatctgttttgtgtactgctggattgccagtgcctggtgcatagcaggtactcaacaaatataggtcacgtgcaggcaccagtgaaaggccatttcctggagcttccctgagcttcccagcctggccagtggcttcatacactactacctctccatgctgtgatggtgttggacacggcttaccccctcaccatgcagactgggccaagccatcccgtgcctgacagcacacaggacagggcctggcatggagtcagtgtttggtgcatgtttgttgagcaaatgtctgctttgtaagccggggttgctggtagagattttggtgggttggggaggccagagggatgagctggagctggtattatggaaagaatgtaggagcccttttctgtcctgttggtaacccttgttagataccctgtctgagcctcaacttcattgtttgtaagaaagaggatgattattccaacctcacaagattataaatcaatgcatgtgaggtccttggtaagctctaggctctataaaagtgctgtcagcattaatcttgttacctcctcctcttcctttcatacttcctcctcctttatcatcatcatcaagtcagtgacttttcgggggacccaacaaaagcatgaggttcctgcctgtgtgagttggggtatatatgatgcaataacagcctgagctctggagctgaggacatgggatccagtcctggctttgcaggtttgtgacctggggcaagtacttaagaactttgcctctcattttcctcattggctaaatgggaaaatcacagttctacctgatttgggtagtttcagccttagccatggcaatcattgtaaagtttttagaacaatggctggcacatggtaagagctaagtgttaagtaaatgaaaaccctactatcagaggcctatgccagcaggatgtttggtccctttataagagatcaggagggagacaggtgcaaggtctttctctgctgttagcgtttcatcctcctgtgtgttgctgcagggtcacaggctggctgctgctgttccaggccccacaggcactccagagcaggaagcaggaatgcagtcaggactgcaaactgcacctgcaatggtgacaaatgctttttctgtaagtggctctctctgtctatcagcaatctttcccagaggccccagaagcctgttcctctcctttcattagctagagtcggagcatgcagtatctgtcactgtgtggggggacccaggatggaggaaaagtcacctggaggtctatagctttgtgctgacaacatacaagatgggtcagtggcccatgacacaagagtgcaggggccagtggggctgctttctgccttccctgtcgaaagcctccctgccccgggttgtgtttctctgctctgggttctgtcttctatctctgctgcctcatagataggcccctctcccagtcacctggatgtgctgggggcacggaaggagaatatcaaagggcaggtggtctctctcaaggaactttttgttctgctaatggtgaaagcgtattgagggcttctgtgtgctgtgtcaaatgcccacaccctgtaaggtaggttatcttcttctcacttacacacggaggctcagcggggccacacagtcagaaaatgttgggacctgatcttgtgcctgggtctgtggctcctgccctagacagcttgagtggacttgaccccaaggagggctaggcatatctccaggaagccatgggatgcccacaccacattttttcagggcgactctagctaccagtgcctttcagggcagaggccatgaatggtgaaatcagggatttggttctggaagagctgggtgtgttgtttttaaaaagccttggttggcattgcattgagcaccactctgggtagtctctggtcacagctctaggtagagagtccctcagggatgtggtcaaaggtgcaggaagtgaagttcaaggctacgtcgtcaagccaggtccaaggaccattcccacccgccactacttcaggtgttgtttttccaggtgaccagcagagggcgcggctgcccacctgacgaacctggcctgtgtcagagtggtggttttgccttcatctttccttgggtcctggaactcccacactggtgttttgccttcttgtttctctttagatggttccctatgagtttagcctgagatcgtggcttgagcagttcttcttaagcatttgaagtttgctgaatgagttatttttacattaagcatgaagaagagttccctggagccccagagaagaaactagattgtcctgggggactgaggcagcagagggagcatgagcccctcagtcccacaaagcccggagccagcttggccgtggggaggctgagccttcactcctggagcagggcagttgcctggctaggctccgccgtgcacattcattcatttattcatcaatggatatgtatgtactgggagactacgacctcccaggcacattcttgggtgaacaaacacaacaaaaatccccgtgcctgtgaagccgacattgccaccatccaggtccttggcccatcagctccccagggaacttcaaggctcccagggccttaggagagcagttggtagcataagaagacggcggaattgagctaaccgtctaagtgcccgcaagaagtagcctcaggccagtggttggtttcagtttacaaccccattgtgatgggcagcagactcttccacatcaccccaaaggctgcttgtcaaacggggctcctcctctttgctgcctcctccctccctgatctgatcctccccacccaggagatagcatcacacccaccctgttgtcagtatcagatttgctggtaacctcaattctacccccctcataaatagttaactagaaaacaaaacaaaacaaaacaaaacaaaccctggaggtatccttgacttctctctctagtcccccgtagctcatccatcacaaacctgtgggagccaccttcagagaacaccgagtccagcctgctgggtgcctctgcctattcctgctgggccaggctgctgctaccactcaccaggatgatttccagcctcctggtccatcctgctgcttcctcccttgccccacatgtcccttctctgacagcagccagaaggatgctctggagacccaccactgcctcagtggctttccaccatccttggaacaaaatcaggctcttcctgaggtccatgagatgttgcatggtctgggtcatcccctctttgtggctgcagatccttgctctggcctctttgcagggacttcagggctccatgctgctcccacctcatggtcttcgctcaggctgttccctctgcccggggcgcccttcctcccttgcatgtccagttggcttccatttgcccttgcacttccagagcatcacttcttcaaaccaggctccctctctgctccagatgaggcatgctgcactctgtactcattgaaattaattgatcctttgattcatattagtcaatcttgtcttctgtgctagacctcaagctccacaaagccaatgtgcaatcatgtctcattcatggtggtattcctggcaaagtgactgtttgggcacagaatagattcttaggaaatattggatggttggatgcatccattggtctgtacctgctttaagaatgagaccaacttgggaggtgtgtgggggtggaattggtcttggggtaccattcctcaccactccctaatgagcaggggtgcctcatacatgcgctgtgtgttggaggggttctgccatccctgagccacctttgcagtgatgtgctccctggctgcccctgggcagaggaaactgcctttgcctttgcggttttgtgagttttgaaagggacttgggcaatttggactgactctgtcccatctttgtggttcttcagggagcagtgttgggttatcggggctgccctgagtcaggaaatggctttgggttttcggatcaaggagatcaaggggcagaaggggggtccttcgatgagcttctatctgatctagaatctgggtggagacagggagggtttcagtgttgattatgcccaccagggcaagaggcagaacccaatcctccaaattcaaagctcagcctagtgcctctacatgctttttttttttttttaaagctttattgaaagaatttacatatcattaagttcacgcatttaaagtataaaattcagtggtttttagtatatttacagagttatgaaaccatcaccataatctaattttagaacattaagaacatttctagaactcaaaaaagaaacggtacccattagcagtcagcccctctcttctcccactccccatcctcggcgtccacagatctgctttctgattggatggacattgcatataactgggttcatgtggcacgtggccttctgccactggcttcttttacttgcataatgttttccaggttcatctgcatgtgattgtggcacatgtcagtacgtccctccttttcatggctgcatattatcctacagttaggatggaccacattttatttacccatttatcagtccatggacatttaggttgttcgtaattttttggccattatgaagctttgttcattccaatagggtttctgcaatggccttccaaatccaccccttgccagggatcttgttcaggagggacaattggtgactttcacaaaaacctgttgtgggccctcaaggctggaaaccctcctccaaacaggtgcctttcacacaccttggggaccagatcctcacagggctcaagccagtcatggtctggagatgaccgactttgaagtccaaagtctctccggcaggcaatttacccggagaccttattatcttctattggtcagtagaggtgggattgctaactttttttaaatttaaaactatttttagtatggaacatctcaaagccaaagaataatataaggaaaagctccagctctacctacctttaacaaaccacagtgctttgctaaaatatatacttctaagaaataaaacttggttgcatctcatcttctgcttccccactccatgtgggctcctgagctcaaatgccaagtcttatccttttatatgtttttaaccctcatccatacacagtttggtggagtaggtgaatgggtgctgctgtgtagaccatctgaagggactagggataatttttggtggtgcacggacaaggcaggaacattggcttagatagaaagttccttccattctttgtccttatggtaacattaaggaggatgtctctattcggtgcctgcctggctgaactcctctctcacccttgggccctttttaaccacacaggagacagctcaggccaagagtggactcaggtattgagttagtgccgtggtcccccccaccaatgccagccagcgaggctgtgctccatcagtcctattgaaggcttcctttaacatgcatgtcggcccggtgtggaggtgcacactgtactcccaagtactaggaaggctgaggtgggatgattgtttgagcccaggagtttgaggctgtagtgcactatgattgcccccgtgaatagccactgcactccagcctggaaaacagagcaaaactctttcaaaaaaaaaaaaaaaagagagagagagagaaaagaaaaaatatgtttaagtgcaaagagttgatttaaagacaaatcttaagggatggaaggataggttttaaatagggaaggctaaaaatcatagggatggttggcaaatgacagacagctggagacctctggtgtgatctttctcctcccccccacctatagccagtctctgggctctatcccttcctgcccatccccaccatttctgcacctgccgtggctgggtcagctgcaggcttccttccaatggaactgaactgtctcaggtgttcactcacccagactcggaaggggcccaaggcatggttgggggcaaggattcagaaaccttcccatggggccagtactcagtgtgtcaggacagcccctggggacttggagtgggaggtgttgaagacccacttggagagaccctgggccaagagcattggctgtggcccagctcttccacgtgctggcttgtaacctgggcaagagtgctcacctcttgaagttgccttcatctcaaaagtggagaccacagtagctctcacctaccagggcagttgtaggaaggaatgaggtccccatgcaaaatgctcagtccaaggctggcaggccacttcaccatccagccagcacatttttatgtggataaaacgtatctattcctagcagtttcccaccagtttcctctttgtttcctgatcttaattgccaactgtaattaaatgattatttgggcatcttattagtgtgttggtgaccattctcggcttcaccctccccctttcccggaagactcaaggagttggggcgtctctgtgtttgtgcactgctaggtccctaatgcctggtgtggtgcctggcacacactcgactctgcacacagtctgaatgaatgaatgagtcctttctttagaggtgactgatgctgctgaaataactgctgctaagagcccaaagctctgtgtggagtgaacatccactttattccccctccccaccaccaccccgctcagttctgtccttggcgcttaaccgggatttcgtccacactgccagcgctcacactgcactcccaggccctgctgtaggtgctaatctgatgggggcagccttagggagggctctgtccccagcaggaggacccttggtgagcgactctccccgcttgcccccaccccttccagcacctgcaaagggggcttagagcggggctgccccatggggttgagaaattgaaatgggggtgtcctcccccaggtgtctctgtggtccttgaatcctggtgtctgttgaaatgcctcctcctctgggcaccttccaggaccaggccaggtgacaccaccattccacccccgtctctacccctttcctggactttcttccttccctgccctggctggggaagcagcggctgcctgcctgtgttcaccccacaccaccgctggggttgtgagaatcgctccttagcaccctggaggacacctctgtgagtggcagccctggggggtgtcgcctcccttgcctggcccctcaggttcctaagggcgtctgaggaaaagcctcattggaaagcgcccgtgccctcctccctctcccccgcccccccgccccccggcagggaggagggttcggagcgagggttcggagggtccggggtgccctagcaggcccaggccaggtggttgcggggaggaagcctcaggtcgctcccctccggtgccggggtgggcgcgtcgggacccactggcctcccagtcccaggagaggaaggaccagggaaaccagctgtctgcagctgctggggaaattaggggctctcagggttccctttcctccgggaggggaggaaacgggactaggaagctttcctgtttctagagcacggcttggtggggtgggcggctcctaacccggggtccagcccctcctcccccaccccggcgcgcggtccaggtatgtgcgacccctcccagtggccacgcgccttctcacgcccctctcccgtgacgtcatgctcctctcgcgcggcatgatgggagaatcctaatgttttccaacagatgctccaagaacagctttcagattaaagcaattgcaagagcaaagattcttccttttcccttttttcctgggggggtggggggtggggtggggggagggagcgcccccagacattccaggacatcaccccctgccccaagcacgcaataaacactgacaagaaaaagtttttatttcctggttcaacttttttttttttccctggaatatagactgaagaatgggaataaacacgaataaataacaaagcgaggccgcgcacgccgggatgcgcctggctgcagccggcgaggctattgtctccccgccctgaagccagccccggcgtctttctccagctcgtttcctttcccggccttttttttttttttttttttttaattttcttttttaaaaagacgccccctccagccccctcgccggtgaccttggccgcctcggatgctctgattccacgcggctcgctctaacttgcccccgcgccggccgggcccatggccgcgtcggaggacgggagcggctgcctcgtgtcgcggggccgctcgcagagtgaccccagcgtcctcaccgactcctcggccacctcctccgcggacgccggggagaacccaggtaacgggctgggcgggggcggcgggcgggtcggggaggcccgaggcaggtggcgctgagagcaggaccccgcgaggctccgcgccccgcctgcattcggggagccgcggcaggaacccgcgctcggccccgcggttcctatccccagtctcgcagggctggggcgcctcggagccctttgtccataaaagagctgatttcctgggtagagccgggcgctgcagcttcccctcctctccggctggtgagctctgccgtcccctcgaaggaggcttcctttcctcgggtgctgaccggctgggggaagagaggcagacccgtggccgcctccgcccagcgccggttctgggccattccctccctccccactgccgggccccagctccggacgtccccgcttgggcatctgctcctggaaggcagcgctccgcagctgaggccaccgcgctgagggcttccaccaggcgcctgactccagcggggcctggcgcacctgggcgcgctagcccccggacaggtgtgctgggcagagccgccggcagggagacgaagggcgtgcgccaggacagagcccggtttcgtgacagcgtgtggactccgtccactcttccacccccatggcagcgttgattgtttaggtgataaaccggtcacaaaggcgtctatagggcttgattgattactttccagagaggaagaaaggcctaataaagcggggggggaggtgggggggggggtgggctgtgtgcgcctgtcaccatggagacgcaggaagcaaagtgatcattaaaacctctctccaccagaaggcaattttcacttcacagggagaagtctgggcttctgaaatgtagggttcaaaaaaagaatcaaagctggtgttttggtatcaagccacaggactcagttttgtatcttagagaagcacaattccttcgtagattctgttttgataacaagttgcttcgcctgcctttgaagacttattctctctaaatgcaacgaccccagatggggacttgatgatgttaaatggtgggcatcagaatccctggggcccgggtgaaggctggctttgtggggagggattcctgcactggaacacaccagagcttcccgataaactgcctagaggactcattacaggcagctgtgtgggcactggatccctcccccccccatttgaaaatttaaacaataaacccgggcaagtattggaagatttctttgttaagactattgacactgtgtcacttggtcaaactaaggtaccggcctgaataaatctctgacttttctttatctgggagggcaggttaatttccttagagtttcaagcagaggctgccatggccgacccttaaggttttaattaatccttttactaggaatgggggattcagccttcagcactccatgatggattgcctttctctgggttggagaggcgcatccacaactgttccaatcatggaagttgagtggcttctcatgagaatccttctaagctccctttgtctccctggcagtaagaggaagcaaacttgaaatggaaattatggaggacttggctttttggctgtatgtgagtttatgcctctgtgggtgggagcggagggttgggcaggtggtgccggtccatgagagaaggaggaggaagggctgggatgcctgtgattaagttatgcgtgggagggcacaggcttgagctctcctctggtgcaactggtctaaatgggacccagagaacaggtgtcagaggtgaaaagtctaaaatatgtgcaattctgtgagcagtagaaccttactaaaaagcaccaagcaattaagtatttatggattgtgtgaagcagattgtgtttctgttctggcagaaagagaatcagaatcatcaagttggagggaacttgggaacttgatggaggaagggcgggctcagggagtattttctgtaagcaccttgcctggctggcctggtgtgtgcctgcatacttcttttgatggtggactcagttcttcctgatgtagtgcatacttgtctttgggcagatctgtttaagaattctttttccaatggttccaaagggtctggtacccatcagtcctgatgggatcttctcctgctgggtgttactcagggctttcagagagcctggggttttaggtattgaaacaacctcagtcacttcttggaaagtctaggcccttcacctgctcttcctagatagcctcccttatttgtccacctgctgctctaatgtgagactcctgaaaattgaacctgaagctccagctgtggaataacctcacacagagttaagaagcagagctgtctcctcccatctaaattctataatttaatgaaagagtccaaggttgcgttcaccctttcccctgcaaaggcatttttaatgcatcagtatttgcaaagactcaaagcattcttcaaaaggtgagctatgttttgacacctctttctcccattttccagaggttacccctgctgggaattgaggggcatcctttggacttttcctaatgttttatatacttgtgttgcttggaaaatggcatatgggaatgtgctggactcatggctcttccatgagtggttctgctccacactgggtctcggagatcttgcctcattgcaatatccatctccctttcccttttaacacccacacaggatgccaagaaacaatttttcagtttagccattggatatttgtattgtttccagtttttacccactacagacaacacagctgtaattacctgggcacaaactgccttgtactcacctgagaatttcctctagggtgggtgtgtgccagctcttgggatgttgaggccacaggggacccacatattttattttaatgatattgcactctcctagaaaatgtacgaattcacactttccgtaatctatgagagtgccctttctccaaacccttgccaacacctgagatcatcaatctatttttctctagcatgaagggtgacaaatggtttcttgttgtgttaatttgcagttccctgattgctagtgagcatgagtgtctttttgtggccttattagttcattaaatctcccatggccgggtctgtggccatggactgtgtggcggggatgaaatatttcccctaggcctgaccttcccgccactttcaccactgcttcgttaatgggcccgtctgtatctacacaatgtgcctctctataaatccgcactctacacccgtgagcatggttaggtgttcttccaaaatagaaatttaatcaaaggtaaggaagcatcccctgatctttcctccttcagaggagctcatggtcacaaggggttttgcttccttttcttccatctgctctcaggctctgggactaggcttctgcccgctccacatcctggggccagcccctggcatcggccccagcacgatggtggcctccttcttgtcgggtcccaggctgcctcctgggccttcctcaacatgatcccatcactgctcctcaccagccatcccctgtcccttggctgtcgctgccttgctctgtcctggctccatgcctctccagctcctttctccaactctctggctctgagctccagacctctgtgttctgcccggtccttccagtccttcagacctgttccccaccccagggaactctgatctcatttctgatttgctcctggcactcttcaacacctggggttcttgtcagtttcattctctgtggactgtcccttctagactgggagcctcttgaggacagggggcttgaccatcacctgaagtgctgcacccctgagctcagcacagagctcagatgcaggagactttcagtaagcatttgtaggacgaatgggcacaagccccaggcgctggtgtctcaacctatgtggcggtgcctggccaggcaactggccactcctgccagctggatggggccagagagtgcttggagggagagcaaagaggagccagcagctgcatccttctgcagggccgggtccaggtctgctttactgcctggagagggagaccctctcagagcatcctctcctgtcatgagctacagacggatgcacagacacattccccaggccctgggctcagggcatcccatgctggccccttcctcttttatgccactctgccagcagacaggtgtgggcttgtgctgatggccacttccttcatcacctgtgcaccctcatcacccacacaccgtcaacaccaggctctgttcttgacacctccctctcccaaggtcacaggtctgccagacacgggcctcctggagcccaccccacttgtttcaggtctcccacccccacccccaccctcacccccaccagggtttagctcctaccttccctttcctggacaacctcaacactgagtcttggttctcttcctcttaccggttttcctgcagaacaggaagtttccaaaatgcaaatgtggtctagtctctcctttgcctcaaaccctctaatgctgcccccttcctgggcgtgggagagggcggaggcaagagcctcttttgtctgtaccatggctctttctagcttccttcctcgaatgttctcttattctggagtcctgggttctgaggatctccctctggctccttgtagagtgtctacatggcttaattagtagtagaactatgcagtaattaccttgtcagcttcttcagggttattaaaaacataaaagctagatgcttaaaaaatactgagtttaagaactcagagcttttttttgattatgaaagcattgcctgttcattatagaaaatggatgctttaaaattccttttcctagctgggcatggtggtcacacctgtaatcccagcagtttgagaggcctaggtgggcagattgcttgagcccaggagtttgagaccagcctaggcaacacagtgaaaccctgtctctataaaaaatacaaaaagttagctggttgtgatggtgtgctcctgtcgtcccagctacttggggggctgagccgggaggatcgcttgagctggggaagcagaggttgcatggagctgacatcatgcctctgcactccaacctgcgtgacagaggtagaccctgtctccaaagaaacaaaattcctgttctctgcccccttctcaccctaacaccacacagaagccaatgacaatggacccctttgtctttaggatctgccaggtacctggcgaagctgtcagcattggaacaacagacatgaggaagtcaggcccaggggcaccgtccagcctcacctgccttcctcatggtcacaggaacctgttttcagtacctcacttggtactcctggagatgatctcatttgtttattagacaaacttgtttatggtctgtccaatacagtagccactaactacatgtggcaatttgaatctgaataaaataaaataaattaagattctgtttcctcagttgtagccacatttcaagtgtgcgggagccccatgcagctgtggctgccatactggatagtgcagatctagaacattccttccttgcagacagctttgttggacggtgctgcttggattgtaagctccctgagggcagggccttgcctgtggtccttttggctgtgtcaccagtgctagcactgtgctaacacttggtagttccccaatgaatgctgacagaatggatgtgccagagtgactggtgtggtcttgagctctcctgcgggaagggaccctcagcctccctagtctcatcatctcatcctctgaaagggagggtacccagcagagataatttcctatccacacagaactcatttatttcaatttagtgagctttcccagagcacctgcaatgcagcacacttggcccttgccagaagggcctctttggacaagagaacaatgagatgcaaagagattctttccctggggctaaataaatgtgtccaagtcctggctcagccatggataagctgtgtgactttgggcaagtcactttacctctctgaatctcagtttcctttaatgtaaaatggtaggcattattgtccttaagttcagaatgagtgaggataactgagctgttgtctttaacaatgagtaaattttgagacacagctttaggaggcagacacctccccaaacattctccaatccccttgaggtaattccatcttctgttaacaaagtcatggtggcagtgaccacagtgatgtatacagcagggagcgggaggaggcgcagcctgcaggtggaccccagcccttctgtgtgcctggctgagctggtcagcctctctgagttctgtgaaatgtgagttagagcaggactgatctggctaggggccaggcaggagtcatgggaccgtgtccctcagtgacgcagaacagcttcaggcaccagggccattctcagcaaatggtggaggaaggaggaggaggaggaggatgtggttcctgctctgattctggattttgggcccctggctctaaaaggctcctcccctacactttcccactctcaccttttgtggaggctgtgtctcccctacccctgcctccctctccggccccaggtccacccagcctcggatgttgttccccggctcccttcctggctccccagcttgtgaatggaaatctcctagggtcccccaccttcacaagttattccctctggtctggtaattttgggatagcacactggttgtcttgaaatgcgatttgaatgtgtattttgcggggattgttttactctgatgagtttgtttcctttgcaagtatatcttcagggaaggtgctttttaggggagggtggctgtctggaatgacacaggtgagccttgttaatgctagtcctgtcgcatggccaaagcgtgccggaggggacggtgcaggtagtgggtgtgtcctgggccctccccagagctttagccagggcagcatatatgggaggatatgaaatgtcacaggaacagaggcaaaaagaaaaagtttgaaaaaaactagtatattagtttgagaccttttcttattgaatttgagagctgggttctattccatgcactagaaaactctttaacacagggcaccaaactgcagcgtctgcagggccgggacttccgctgtgggagggtcagggtgtgtgcctgctggggcggagctgcttcttgccctgtggaaatgtgggcccaggttggtgagaccatcttcatcttttttttttttttttccaggacagtgtctcactctgtcgcccaggctggagtgcagtgacgccatctcggctcactgtgacctctgcctgcctggttcaagcaattcttgcctgctgggttcaagcaattctcctgcctcagcctcccgagtggctgggactacaggtgcgcgccaccatgcccaactaattttttctgcatttagtagagatggggattcactatgctgaccaggctggtcttgaactcttgaccttgtgatccgcccactttggcctcccaaagtgctgggattacaggcgtaagccaccgcgcctggctgaccatcctgttttaagagtgacactgggaatccagatttttatatgacatgttgtgttaggattttgtgttgctataaagaaatacctgagactgggtaatttataaagaaaagaggtttaattggctcatgcttctgagggctgtgcgggaagcgtggtgccagcatctgctcctggtcaggcctcaggaggcttccaattatggcagaaggcaaagggggagccagcacatcacacagtgagagtggaagcaagagagggatgaggaagggaggtgccaggcttttttaaacaaccagatcttttatgaactatcagaacgagaactccctcagcaccaagccattcatgaggaatccgcccccatgattcaaacacctcccacccagccccacctccaacattagggattccatttcaacatgagatttggaggggacaaatattcaaaccctatcggatatgatttttaaatattgacaagtttatctattagggattgggttgactttatgtaatagaaaacctaaataacactggcttaaagaagataaaggttttccttccaccagaagtccagacagcatgatggcgtccctgtcgtagggtgggacgttcagtgaatttcatactgaattctggttgcaacatggttgcttcacctccagcaacaagtacattttctaggcaggacaaagagggtagggagaggcacaggggtgtccacctgccgagtttgacattgccttcttgggagcactgcccagtgacacccacttatacctccttggtcttaggacatcaaaaggctactcccagctgccagggagcctgggaagtgtagctttttctttttgtttgtttgtttgtttgcttaagataggtgtattgctactctaacaagagcaggttccgcggaaggggagggtgagaatgactatcaggtagtgaactacagtctctgccatatcaactttataaaagcacaatgtgatcaaaacaaaacatgtctgggagctgcatgtggcctgtagttgccctttcaaacctcagatagaaagaatctcatgggaagactgaagcagtttttatgttttgtgccattactaagaaattaaaggttggactaagatatgtgatccaagcctaaacattatgtccattcaaattttatttaacaatatccagggaacaagataggcagggtcactgttcctcacagagccaatcatctggtcagcgatcaacggctggagtgaaaatgtgcttattgtcaactcttgttataaaaggagccatcatacttccttttattgaatagtcctctaaacccttgaggtagggccagaaagctagcgaggctgagtaaccggcccatggtcacatttatataaaggggaagcttaaagaggatcttgaatccaagtgagtctgaggcctggcccatccctatctgcaccacccagcttctgcctccctcatcctgcaacttactggaaagcggtcctctgtcctttacatggaatagatatgtgtgtttcacccccattcctggctccagccatctagctgacagacgtatacatacctgtagtcacaaaagcacacagaggcagatgtactctttcatttcccagttcatttaaccagaatggccactgggacaagatttatgtattgaaagtcaggcaaggcgatggcagagaatcagctgtctgtagagttgttgaaggtcccgtctttaatgggctgggactcgtgttcctgtttgttaaagcaagtcggttggatgggtagcttggcaacgcaccttatctaatggtcacgacatctgtagactttgacgttgattagttggcagccacgaaatggatcagccctgcactgagaagacgggagctgtggctatacgacctaagaagtgtgtttattatacatactatgctcctgtttgtaatacaacccttttaaaaagtcaccattggtcttgcaatactcttcctaatgagttgtattgttatggcattactttttggttcaattatctcttgaaagtttgtatccatatatagaaaaaattgttgccttattgtaatcactagctctggagtttcaatgaagtcaggaagatatgccaaaaatgatctttctgcttccctttggcaggaaggcattgtcttaggcagcgttactcctggggtgactctgcgtttcttgagtcacgtgagtcaaatggttgctgactttggcacgtttattggccgggttttttgtgcaaagcttctgagatctgatgacctccacggtgtcaggactgtcttgtcacctgtttttcggggatctgcctggcccctaccccacattctttattttcctgttattctctatatacaaccagagatacaggttttccatcaagagggggcctatagaagtgttctttccaatcaagcttatttacataaaaaagaacatgacttgaaaatagtaataatgtagtggtggtaatacacagaaatatgcgaagaaaccatgaaggtagtgcttggaagacacaggcatgccaaaaaccacaaagctggtgtacaggtttcagtgaaatggggaaatgctgttataaattttcatcttggtcttgtggcccggccatgattacttacctatttgctgacgcattaagcactacagtgtgcatggagcatggtgtgagggtatgcaaaggggcatcgtgcatccgggaagctcatggtctggctaggggcataacattttgacaagtaaaatgacagggcacatatgtaataagtgccaggcctctcaaacttgtccccttctgtgctgtatcccattcattctctgccaggtatcacaggcttctgcaaaagcattctccagacctccgtggccctacagcattgagctttcagtccttgggtttctgaaggttggcagggtcgaaggtccaggctggctcttctccgtgcatctcttatccttcttggacctgcagtctaaaccagccatgttagtcttgtgtagtggtgaagatacatgggacctcttagggcctaggctggaaaccttcacttatgctgattctgttagcctattggccaacttcaggtcaaagagagggaaatacacttgacccctttggttgggggagcaggaaagtcatatgtagatacaggagaggtggagaattggggccagtcttgtaatccacacattaggcttatttccctatgtagtctgtgggctcctggagtcagaatcaccttggaatctcctgccacctctgataaggtgatgccttgacattggatgccaacagacaaggtctgtggggtgcttgcagatgtgtggtctctggtgtcagactgcctgggttcactgtgtggctttggaagatctacctaacatctctgatccacagttttcccatctgcagaatgaggattactttacttatattaatacccccttagacgagcagttatgatgctgagatgagatgaattctgtaaagcgtttagcacagttcctgggacacaggaagatcctggtcaccatgagctagcattcgcctcctcctatcactgtggagaagttttcaccaaaggccatgtcttggtggataagagcaggaggttctgatctggtgcagttttgaggctcccagatgcccttgtcttcctttgggcctcaagatgcaggagggagggctttcctggtctgagctgctgggtgaaatcaggcatccctctagaacttcctcccttcaccctgtactgccctggagctggttcaggagactgctggcatgcaccgggaagctccgctcaaggcgttgccccctgatttcctagtgggggagctggcttgaggcagtcagaatactgagttgggtaaaagacccagggtcagaggctgagtctcattccagctgggacgtgaggctgtggctgcgctgagctgaccaccagcccctgggttccttagggttgcctctgggctcaggaaggaaactgcatgtagacactgagctaagggagcactagctgtttgctttggttagttctttcccctaatccttgcaagtagctggttctgctttgatgtgaaataacaaaagatttagggagaatttataatttagctcatttttttttaatgggaagggtgagttttggagcacatttaataccatgccatgtggggtaagctcagagcgttgcctgcactctcattcacctgggctggctttccccgctcgcttccccgttgggagtctaatacagcctgccttttccttaagatcattacttcaaacagtgttgacattttaatgtgattattttcctgtaatatttttccagcccttttctacttggggagtatatttgcatcctttttctttagggatttgtgttgttccagctccatcctggtctgtagaatagagctatgctcatagtaggtgcatggtaaatattgattgactcttgggtacgtgatagtgacgtctagcacccctcctcatacctattcccatgttcccataaaaaaattaaaatcgagggagaaaaacccaaaaaaaacaacaataaacaaagagttccatgatggcttcaggttaaatagtctcaccctgttggaaattcctggagcaaatgagcaagccagtgggcaggagcccgagtgtgagttctcaggaatatacatcactgaaagtgagcccacacatttgttaatgattggtctctgtgtggtgttaaaaaattaactaataacaatttattccagaggatattagtgtagagcagctattttcttataggaaaagagggattccagtcatttttttttttctgttttgttgaactgatgtttgcatcttgcctggtgaaatctttagcaaggaggaggtggaagttgttcactttagcacccaggggctcagctaacatttcgtggggctgacattctgggtgcctgtgctaggtgtggaaggagaattaagcggcttctgtccacaattgagagtctgagtagaaaaaagaggcatagctcacggcacgtgtcatttctcccttcgtccctccttccatccctccctctgtccttcttctttctccttcccttccagcaaatttagtgcctatgataatgtcaggggtgaggctgggcttggggaatagcgcagcaaaccgacctgttgcctcatcctcgtggtagatcgtctggtgagtgatgggcttggatcacatcagctcataggcgaatgccccatccagctgtggggaggctgccctggagccctgcgggcttgtggaggggttggcatatctggggatctgagggaagggtccaggggagggcacttgagttagagccaaaaggtggcttcgaattaactagcccagcaggaaagggaaaggtatgctaggccgagagattggcagtgcaaaggccaggtggtgggggcagcttcggctggagccagaggcaagagagaagcaggagtatggcgggatggggctgcaggggagctgggagccagacggttggggcctcctggactggggaggagcttgtctgccatgagggaaccatgggatgtctgaagagagggatgtgagtgtgtgtgtgcgtgagtgtgtgtgacagagaccaagagacagtgtgatcgggcacatttccaagccgtcactctggctggccaccccgggtggaaatgggtcccaggaaggcagcagagtgagaccagggaagagggtgtggcagccacagatggtggggcctgggctggggtttgcagagctcattcagaaaaggggctgggactacattgcccggaggaagatctgtgcaggagaggaggctcaatctcagcttggaagggaagggcaggagagggaagggaagggtatgtgccatgaggcacctacgtggtgtctgggcaccccatggtgcagccaaaggctcctcccaggatcctcatgcaggagccctgaaggctgtgcaagaggtgctgtctcaccctgagcagggccgagagcctgagaggtgctgtctcaccctgagcagggccgagagcctgagaggtgctgtctcaccctgagcagggccgagagcctgagaggtgctgtctcaccctgagcagggctgagagcctggaactgtttagagagagtctggggcagtgcaggatactcggagagattgcctggggtgccctaggatggactgtgttttcttctttatacatgagaagctggaaaatgggagttggacgtggattccgtgggcaaaggttcttttcctggcacagtggagcagggatgctggcaggggtggatgctcactacctcctgtgtgcttttcctactgtgagcaaatgtggaagggagaattgctatatgaagaccctccatgacccatatcctgtatagccccctcccctgagtgtggcaggaaccagtgactgtgacaggtttcgcctgcatgcctaggctatcttatatgcacaggagactttaagaaagtataagccttggtggccctgccctaatcagggaagccctaaaggggacaaaattcttcctggagattgagactggaagcacaggatggaagcgggggatgctggtttgaagatggaggggactatgtggaagggaatgtgagtgacctctaggagctgagagtggcccctgctgatggtcaacagagagatagggatcttagtgccatagctgcagggatctgactcttgctaacaccctgagtgagcacggaagtagagtttccccttgagggaagatgagaaggcaccccactgctacactgatttcagcctttcggaccccgagcagatgagaaggcacctgggctgacacaccgatttcagcctttgagaccccaagcagaggacccagtcctgccatgtcctgacttctgacttacggaactaggagctaataagtgggtgttatttgaagccagtaagcttatggttttgtgttatgcagcaatagaaaactaatacggggagggaagtttattgcttccatattacaggggaaagcctcaggttcagagaggtgaagggatcgtcctggtcacctggctaccctggcggagctgagaagcaaagctgtgtggccagactctgatgctcctgctgtgtgctgcctcggtttcctgatctgcgaaatgggctggtcatggcattgtcctgaggccgcaggaggagtggcctggaggctgtgccagctgtgaaagtgtcagggcccttgtgactgttttcaccctccctgttggcacacaggacctggaggggtgcccctccgaggccctccctggcttctcacactcaccctaaacccggtgtgtttccatggttactggtggctttactagtgtgactctcaagctggccccatagccactcctttttatgtgtatttctaatttcctttagagcatttttaaacttttcgctttgaaatattttagacatctaaaaatgtcacaaaatagtaaaaaaataactcctgcgtacctttcacctatattccccaaataacatcccacttaactacagtaagtcatcaaaaagaagaaattagctttggtacaatacaattaactcatctaccaaccttatctgaattgagtccatttttctgctaacatgcttttctatcctgtgatccacccaggatcccacgtggcacgcggccagcatgtctccttagcgtccgccaatgtggaacagttccttagtgtcttcatagcctgatgcctttgaagagtgctttcagttattttgtagactgtccctaaatgaggggttgtctgatgtttccttctttttaaatcgagtatatgcgtttttggcacaaatcccccataagcgatgtcgctggagatccctaggtcagttggaccaatcctggtgatgttgactgtggttgctcagccaggtgcctctgctctaaagttaacactttcttcctctttgtaattcgtcagcgttttgtgggaaaccttgagactgtcagacatcgtttctcatcacaccctttcccaccctgggaatcctcgcctgccagttgtcaccatggtgcgtgttcaggggtggctgtctttccgtcatttctcttaaatgtattagtgagttccattactcactaataagggaaagcttcccccacgctcccatgtatttattcacctgtttacttacactagtgtggacgcctgcatgtatgtttatcctgtggagtagagtccactgctgtcatcttcttgttgctggaactgtcccagacgtggccactgggagctccttcgagtcggtgtctgtgccagtggagtgctcccatcattgtctgagctctttcttgctttctggcagcataagacgctccaggcccccagggcctcgcctctgctgaggtgcttgctgtgcaggatttgggaaggtgctctcaggggctgtgggctcccatgcctgcttccgcctcatccttgcagacccctgtgcaggtaggttatttgtaggtgagcaccccagtgcacatagactgatgtagccgggttccccagggagcaggtggcagagttggggcttgcccagactcctgctcttgccctgtggaaggacctatgagtcggaccccacacagggattaggtggggccatgctgggcagcccatgtcagcctggcacatcttggggactgtccacagtgtcagggctgggagcatggtcttggcacatgtaacatgccccgtttctctctttcttctggggttcaggcatatttctggtccatgataagatctttgcctccttcctgtctttcttgccctcgtggatggcccagaatcctttgtagatttcccacagtggcctttcccaggcaggcactggctggcagtggcagtctagacttcctgcctgcctcagtggccttccctgaaggagctgtacaaaagtgacagggagcacaggccactggcccctggggaggtgtggggcatggtgagccacgtccaccacatactgtgtgccaagctggaaaagagtttgggggtgcagaggacaaaggaagggaggtcacctctacagaatcacatggcacttaatttgtctttcctcttccctacccactcccctcctttcttcccagagacaagaggcagctcctgggagaaggcacagcctctgagactcacaagcagatcttttaaggtcaactttgccatctgtcttttaggcaataaccttcactacagctttttctgcttatttttgtcgaaagtcattgggagaatgagtcattgcgtgtgtatgcctgtgtgtttgtgcatatatatatgtgtgtgtatgtgcatgtacaagtatgtgtttgtgtgtgcaggtgtgcacgtgtgggtacttcccctgatttttttttttttgtgacataacttcccctcatttttttgaaaggctgaaagggactcagggtcaaggccatggtgcatccctcctgcagggagctggagctgggtgcctggaagctggcctttgggtcaggcttcagcctcagccgtactgactgtgcctggccaacctctgtcagtcccttcatcaggccatgctttaaggtcctcctctataaactgggggcaatgctagttcctactcctggggtgggtatgagttccagatgaggcacgtgacctttgcaggattttaacattacagtgacataactgtaatttacctactggtaaatgctctgttcatgtcagttagtagaatagaaagtgctggccctgctgacacagcagccatctcctggtttgcgatggacactatctcaggaggaggctgccgtgtgcctgctgcgaggggtgctccctgtttgctagggaggcccagagactgccccggcacctcgctgcacacagagaggccgtgtgtgtctcttgacccttcagctccacactgggaatgagggagaccaggggttagagatgcctcgggacctgagccgggcaccagctcccatctgtccatctgtcctgggctgctgggggagccggctctggccaggactgatgattcctggcacccaccaggagatgcacatcctgcttgaaagctgtgaactgctatccagagtgtctgggcttatcctgttggagcaaaacccctgggctaatatgtaatcccattgtgaaatgtatttcaaggagggcttctacaaggattctaattttacagcagctttaaccaaaaaaaaaaaaaaaaaaaacccaaatcttcagcaaacactcagaaccatggttcctgtatgatgtatagctttcaaaaacactcccccaccccttggaaatataggcagggaagggaaaataaatgtttttttgtgggaggcaggagcattattgaaaaaaactcaacaggctttttaaaactggaaaagtagaacgcgcgcatgttgaaaaattccagggcggctggagacaggatggggtggggcaggtatgtcggctccgcatggatcaggcttggtccagcccgtgttatgaccttccagctgtctgcttctcctctttggcctcagtttcctcatctataaaatgggaactatagtattgtacgcaccatgcagctgttgtgggggttaaatgatatgatctgtcacattcctgttacatgtatgtattcaacaaacatcgactgtctttttcattagtgaaaaccaggtctctctggctgtgcacccgtctctcgtcccacgacagctgctgatggctttcttgtgtacgctctcaggaaatttctatgcattcttttcttcttcgtttgtttgtaatatgaagggaaacacgctagcccctgttctgtgcctggcttttccctcttaaaactgcatctgtgggatgtagatatgaagtttgaaggatacgtgggaatggaccagatgaaggtggggtggggatggtgaccactgtccctggcagaggaacagcggatgtggtggccatgtggtgggaggggcaccgtgtgagcatgggctgaacggctggtgcgtggggatggggaggtggcttgggcctgccacgcgggacagggaagaccaggttgagggtttttgtctgtatcctatggagtgatggagacctgctgacacttatggagcagagggtgacccactgatctgggactcggaaaggtcaccccacttctgctttggtgcccatgggcgttgtgtagagaaggtgtcctgttttggtttcccaagagaggaaatggacctgctggcaggagaagtgggggagagtggttgggagctgctggtgtgtcgcctctcgatttggagggtggggacataagagtgggaaatggctggggcagtgtctctagagggtggctttcttcgatgtgagcctggaagttggtgaaaattgcccctcttttggtgctctcatgggtgtttggatattttgatccccaggtcatctttcaagccaagtacagcatgcaccaacccctccgtggctgcatcctacagcccctgatccactggtggactgctccacacctgctccctgttggggtctctgtcctcctgggtgatcttctagagcaggagtctcaagctttagggtatatgagactcgccgggggtcttgtctatgcagcatgctgggtcccttcccagagctcctgacttgacgcatctgccatgaagccagtatgaacatgcatttttagcaagatctcaggtgccgctgatgctgctgatctgaggacaccctgctctggagactagaaacatctctggcctggtctccctcccatgctgctcctgtgtagcctgcaggagacacctcctggcagccgggtgtgcaggctggtccagcgcagccacctcagtccctaccggagtggtctctggcaactcgggtaccattctctgggcctacccaaggaacatattacaggggctggagctgacctgctggagccccctaactcagtctgatggaaagaagacttaaaaaaaaacttgtgatgttaatttaaattttacagaaaaattgtgaagctagtacaaagactttatgtaaacctgcaccctggttccctttcactcttatagtagatttgtatcactaatgaaccactcttgaaacattattattaactcaagttcatactttattccaacatccttagtatttttctaatgccctttttccatcccaggatgccatccagatcccgcatgacatctggacatcatgtaccttcaggctgtcttgctgtgacgccttttctgactttgcttgttcttagtgaccttagcagttttgaggagcacctgtagggtgttctgtagaatgtccttcaatccagaacttctttttaaattcctcttctgcttgcggggcatcttgagtcatggaaatagattctcatttgttttctttgtaaattctgcctagagccagggtctgcagagatctctctggaatctgatagctagaggcctcagttgaccctgaggcaggccccattcctgttagagaaggtgcgtggaactggtgtggttgggaggagtggttgagaatggtctctgtgggcacggggtttgcccggcaggcagctgcccagtacggctgcctgtgtggctgatgtcatgttctcatcccatctgatgcactctccgcaagtcactttcagaaactggaagatcccacttaattctgctctggaatatatttagaaatctattcatggccctctcccaaagctgatgttaaaattaagagatatcatttgtaggatgtcatggctgtgcaggaggaacatgctgatgtctccctggccgcctttggtttcttctcttgcttagggatttgcccaactcccattgcccatctgagcccagctttccccctctgagcccagttttcctcctctcaccccaatgtcagagtgggcacatcctccctgcggaggcatgcaggcttttcctctgcatgcaccgtctctgtcttgcgtgacagcccggggctgtttctcacccttgttacgctggggttcttggctgagagctcctgggcaggggctgactttgagatgaggcttctctgttcgtttctggctggttctagatctgggtggcatttggagggtgcaccgcttgtatctgtgaccgaatacctcagggtttgtggtgagggacgtggagatttctgtgctgcaagagatcttagtgcttctattgtgctggggagaggccagcccatcttggggtaccagggctggaccaaactttagagggggtctgacccaggtgttcagagccagaaatattatttgcaatcctctgcagggaatttaaaaatgaaaccattctgaactctccctccagaattcatggtcgtcagccattcaacaaatatttactggacacctgttttaagcctgtcaccgttttttgagtatgcatatagctatatatggcaggttgcagtgacgactcatgtctctgccttcatggaatgagtagtctcgtgggatgaggggaaacagacagcatagaaatagatgtatgatgggactctaggtggttatagatgcctggagtgatgataaagtgaggctggaggaatgagactggcagggaggagagcccaactgtctgtgatagatggtcagagaggacctcagagcagggcatctgtgcagagaccaggcaaagtgagggagctggtcatgtgactaccctcgagaagagcactagggcagcaggaacagcaggtgcaatggccctgcagcaggcatgtgcttgggtgtggtaggaacaaggagaccagtgaggctgagtgagtgatggaaaggggcaagtttttgatgcccacaatgccaagaggtggccaggggaggatcccagggaggtgccgaggcctgggggaagacttgggctttattttcagagctgcccgttgaagatttgaatggctgcagagtgagatgagattgtgctggaggattcgaaggtcatttagtcagagatgctggtggtttggagcaggttgttcacagcagatgttctttgtgcctgcatcacaattccttggaccagctctgccttggtcttcagctgtggcttcaatcaaccagcatgttgggtgatgagcgctgtattggagcaggtggctacactttcaggaatgctgcaagctggctgcagtgggaagtatttacaccatggcaattggcaaatgtacatatcagctcccttataccacccaaacactttccagcacagcacagccatgagcccagtgctgtggatattctcccaagcatcaaagtgcagccaggacatgaggggagctaatgtctgaaggacaatcctcagctgacgaaatgggagtaaacatcccaggcatgcatcctttaggtgggtgcttcttggagctttcagagaatgcaaccttgctgcctacagctgtgaccctggaaatgcacgtgtgtgggtttgcccttcctccctccctcactctcattgctcccttgcttctgcttcctgagatacctcccaaataagctaccttcacctaagcccgcctgcagctctgcttttaggagaatccaattaagatggtggtagagctagatgtggtgtgagagggatcagatggctgggatgagacagaagagtcctggatgactccaagcgttccagcctgagcagctggaaggatggagaggttctggcggcaatggggaggaaccattgagatgagcaggatgggggttgggcaaatcaatgctctgttcagctgtggacaggttctgtttgagagacctatcagatccccaggtggaaattgtacctggagttagggagaggtgtgtggttggatagagatatctgggactggacaacactgattaggtcaggtgcccacctgcatctgtgattcagttgtgccctcctgcttaggaagcgtctgtgtatctatgtatgtatctatcatccatctatttatcatttatctctcttttttatttatctctcaatatatctatcatctataaatatatgtatattctagcatctagtcatcaatcatttatctatttttatttatgtatcaatatatctataatctatttttcaatatatctataatctgtcatccatctgctaatcgatcatctaccattatctatcaatctgtgtatctatcgtctctctctctgtccatccatccatccatctatccaggcagtgcttgcttccttctgccccctccttagcccatccctgcccaggaaaattctcgtccctgctcaaatgccttcagtgacaggaaactcaccaacctcttaaggcttcggcatggaagtttccaactcatgtggccactccagaatgctgtcctccagggactgtgtttctctctcatgtcctcctcccaagatttatttacactcctcacttgccaggagagagtacttgggagctccgagccatgcgtgttccctggcagggtcgcctgtgtgctggggaagaatgggcccagtcatggggtggagacgccccccagctgcagccctggctcccgagcagaggcggctttgtgcttctcggggacaagggttgccattgaggcaggccagggatgctgtgcaagctagcgatggctgcaggctgaaatcgggcatttcacagagagcaagcactgcactgtccccgcagcctgcacgtgaatggaggctttggccctcggagtgcagccgtgcatggggccacgtgcaggcatttctggctcctggctcccagggagagaggcgagccctgttctctccccgagttctgtttgacaaaattcacaaaaacacaaagaaacaaaaagtacgggagaggatcagttcattctcctgactcctggttggtctcaagacctcccctgttgcctgtgctctggaagattccccatagtacctactaggtgggccagagaaggatggatttgtgggaccctggaaggctgggaagaggactgagaagccacagccctgcgctgggaagagccacggaggttagatcttgttttttgtttgtttttaatacaattgttcacactttctaaacttttttgaaataattttagactcacgtgggggttgcagagcttccctcaatgacagcatccacctttccatggttcactggttggcaccaggaggtggacattggtacagtgaggttaactaaaccaactaaaccagaggccttagcgaattccaccaggttttgcaagcacttttgctgttttttcagtgaataattgaatgaaattttatcacacctatagcttcacgacaaccaggtgagacttgacttttaaataatgaggcgccaggccccttggctcctgaagtggcatgggcgacgtgtgtggatgctgactggatgcccacctgcttccttttctctacgttgtgcccccaccatgctccagtggcaggggcagcctcctcctggcccccaggcctctgcttctctggtgcctgtggaggctcaagcctttaccccacctcccttcttcccaggaaggccctggctgcctgagaaggcccagccttccccttctccctccgctgttctggctgagctcatctcctgtggctgccctagcatgtgctgcagactgggggattccacagcagaaacctactctctcgcagtgctggaggctggaggtctgagatcaaggtgccagcagggcgggttccttctgagggctgtgagggcaggacccgtcccaggactctctctgtggctgtgagtggccgccttctccctggttctcttcacatgatcatcctgcccttccagggtatgagctccatgcctgtccccagaagatctggaggcttccatcttctgctccttatcagacaatggagcggaataaacacggttgcctctctggaattggagcttagtgctcatgaaataaaattctcttaatctcacaattgtcctcaatacagttgcagtgggtggcaccgaatgagtgtcgtgcttgtcaagacagccactgtggccttccgtcttcccactgactgatggcaagtcactagaaggaagcacccaactccccgtgatggcattaaatgacacccgtgggtgtggctgtagaccaggggttctaggcagccaagggggttccatgcagccaaaggaaagaagaaactttcctgcagaatgcatgaatatagggccaggtcctaaagcccagcccacgggcaagtgtgtcctggtggttgccactttccagtcaactgattagtgtcaatcatgacactgatttcctggcaatgtgtgagatgattttaggtggtaaatgaactattaattttataaagaacgttcatatcaggtatatgtctgtttaatttttcttttttcttttttttgagatggagtctcactctgtcccccaggctggagtgcagtggtatggtcttggctcactgcaacctctgcctcccaggttcaagtgattctcctgcctcagcctcccgagtagctgggattacaggtgcccaccaccacacctggctaatttttatatttttagtagagacagggtttcaccctgttggctaggctggtcttaaactcctaacctcaggtgatccgcccgcctaggcctcccaaagtgctgggattacaggcttgagccaccgttcccagcctgtttaatttttcattagaaaaatattgcatttccattaaagtagacgtcaagttttcattttaaactttcttaagaaaacattatattcattttagaccaagtggttctattagagcaacatccataagagtggtgacgtgtgagtgaagttggggagacaccgggtggtgcagttacccagcaccatctagaggaagtaccactggggtgggcggttacctggcaccatctagaggaagtgccactgggtgggggtcccttcacagaggcagggtccagtcccggccaccctcaaggagcttgtactgtcgaagtggggagggggacatgagaaatgttgactcaggggcagagggttcttaggcttatcaaggaagctctaggattctcggtgttctaggggattcgaggaggaaagttacacctgatgggtagacaggggtggttggagggatttggtaaaacgttcatgaagaaggggtgggtctgtggggtttctggagttgaagtgaccaccaccagggatgctggcatgtggagctagcttcatggctgttagctgtcattgtggaatggaagttaaagtgtgcgttgagcagggctgaaagaggcatagacctcccatactgggagagaagccatgctcagggaagaatgcccagaggctaaaagtcagggtcagatgcccatcttaggggcccttggttgccataattatcaaggcaaggtccttggataaagtctggtccggtgcctctgaaacttctatgtgcatacatgtcactgggagtctggttaaaatgtggattctgacgcttgggtagggcctgaaactctgcatttttaatgagctcctgggggatgctgctcctcagatgccccgctcttctgtcccctagcccccagcaacagcaaacacttagtgcctgcctttctgcagggacaggggagggaggtttgtttgcagtgacagtttttgggtagctatggagggaggagagaggtaggactttgtcttggtccagtttacaggggccttgacagaggcaggaggggtgggcaggagttgccaacttttatattttggtcaactagggatgtttaaaaacaacaatgaagaaaaacccgaacatccttggtttcacaacagtataataataacactattaacaccagtatttcccaaaagaaatggaatttcaaatccaaagagtcaggaaggccatatactccaacagaagacagtcttttcaaggacacagagccagcccccaaaacacctcactgcattgtcctcatttttcaaaggacttgggaaacatcaccccaggctggcatggatgactgggctgaggcttgggggctgcggctgtatgaacgggaatgcctgtggtcctcagagctgaggtctgtgttcccagaagcccctgtagagtggcatctggccccggcctgtggtagcctctgtcctttcccaggagagaggttgccagggcctgagcaaacactgacctggagtgtccctgcttctgaacctgcctccctatcgtcctcaccttgtggtgtacgggacgtgtggggactgtatcatctgggctgtggctggcggcctctcgtctaatgctaccacatgcccttcataggccatgatgagccatggcagtgctgactgtgttctaccactgctccaggttcctgagatgctcacatcctgggatgtgctggggttgagcaccaaagctaggggaggtcctagtagcccactcctgttcctcagtccccttgcgtctggctgggaaaaggtgcacctcctccgtctctgtccacgtggaattgaccatcatcctgcacagtctctgcccctggtaattggttctcagatgggctcatgactcaggcttcacgaatgagaatctgttctaggacttcagttgaagcgcttggaaagagttgttttccctccacaagaagtcacagagctggtcggctgtgggcttggagtgctggtggccattttccccaacccagctggagcctgagaatggaactagcccaaaggaaagctgagcaaagacaattttgaaggttgatttcccgatggcattatttgcatccctggatccagcgtgtgtgaagctggcgcacccccgggcttctcagttaaacacttcctccctttcaggcttcagcagctttgattgggcttctgccatttctgattattacagggacttagaggaaggaaatggctttgcccagatcacagggctcatgaaagtgcccaggctggaatgcaaatgcccacctacttcccctcacatcactctccctcacctgctttaagtgcatgcccagtcccagggagatcttcccatcactctttggggattctgcctcactgaaagctcttgaagctgcttcaaagtggagtatcatggtgtttcccgggagggtggttgccgggtgctgagaaagactggcctgcagtgctcttgcttttgcacttccgtcccccaccttgatcctggggtgcacgggggcaggaaggagaggagtgtgggagttgatggggagatgagaggagacatctacccatggcctctgcttctgggaggacctgtcacactcccagtgacacagcgtgtgctagagattaggcttttctcgtgaaagtagggttttgaaatataaatcattctataaagacatatgcatacgtgtgtttattgcagcactattaacaatagcaaagacatggaaacaacccaaatgcccatcaatgatagattggataaagaaaacgtggtacatatacaccatggaatactatgcagccataaaaaggaatgagatcatgtcctttgtggggacacggatgaaggtggaagccatcatcctcagcaaactaacacaggaacagaaaaccaaataccacatgctctcacttataagtgggagttgaacattgagaacacatggtcacagagaggggaacaacccacaccagggcctgttgagtggtgggggtgaggggagggatcttagaggacaggtcaataggtgcagcaagccaccatggcacatgtatacctatgtaacaaacctgcacgttctgcatatgtatcccgcttttcttttgtttttgtttttagaagaaataaaagaaaatagaagctcacttgcctggatactttaatattgcctgggtttttgtgttgtggagggctctgtaagtcatggaaaaggtattctcaggagctgctaatgacatatttaattttaataatgagtcacccatgcccacaatttattacctcctgtggctctggactctggttctttgagtggtataatagggcggaggttaatggataacacaattaattatttaggaggttcttacaaagccaaagactttgtaacagattaactaataggttcctaacttcattatcattttgatttttccaaagaatattttctcccaaaccactcaactgtataacattactgggaaatgtctaatttttacacgattcctctgctcagtttaaatactaatgttctgcttactccgtcactgttcagcgcccagctttcggtcttcaccttattgcctgggagatagatataatggattcagatgttatgagccctggaagggtttgtaacataaggcagtattttaatgctttaggggctggaaatatttaaggcaatattttaattctcatgagggacgaagtgttgtggttgcaagtgcagcctctgaaatcaggcggagctgggtgtgaatcccagcctctgcacttaggttggttacatcacctctccaactccgttccctccttcataaaatgggcacactagtagtattaacctggttgcattgcagtgaagattcaatgagaaaatgcaggtaaaacacttaatgtggtgtccagcacagagtaacaggttaggagtgttggccgtgaacggtggtgatggtcatctaatcacagcatggaatgaggaggagcaagccctcaccctggcctgctgctcctttgttgatgaaatgcctgtggttgttttcacaccgcagcaacagaattgagcattttcccagaaaaatttcccggtctaaactgtttactctctggcccttcatagaaaaagaatcgctgctccctgccctcaaggcagcctcctgtgcttttatcttctcgggtctcctttcagaggcctcattataggtgagcgccatccagcagaacgtcctgtgatgatggaaatggtctaggtctgcgccatgccgcccgggattgcgccgctggccgcagatggttgctgaacactcgaaatgtggctcatgcaacctcagaatggaatttttaaattttacttagctgtaattgatttaaatttaaatagccacctgtggctaatggcaaccacatcgggcagtgcagtgacaccacaccggctcagagtagagaaccagtcacctccattctagcatcctttctgagagtgccgggtggagggtgctggctttggctgaaataaaggaaagggagaaggctgctccttgcattttctttttctgttcttttttctttctttctttctctctctttctttctttctttctttctttctttctttctttctttctttctttttctttctttctttctttcctttctttctttctttctttctttctctttctttctttccttccttccttccttctttctttctttctttttttttttttttgagatagagttttgctcttgttgcccaggctggagtgcaatggcgcaatctcggctcactgcaacctccacctcccaggtacaagcaattcttttgtctcagcatcccaatagttgggattacgggcgtgcaccaccacactcggctaatttttttgtatttattagagacggggtttcaccatgttagtcaggctggtcgtgaactcctgacctcaggtgatccatctgcctcagcctcccaaagtgctgggattacaggcatgtgccatcgtgcccggcctgctccttgctttttattatgtttttgctgattcaaagcatctgtaaatataaaaattgaacttactcttttgtgtgaactatttggtaaacattcacaagcatgaagaaggaagttaagatgtcttaatcccatgctgtagagataaaggattttgggcagtacatttgctgtcactttcaaatatttgtatggcgcgtaagaggggagtcataatgtctgcatggggtgtgcccccacttttctgctgggacagggactacacaaagcttcatattatcctgattaatggctgcagggtgctcggtgtgcagtggcctctctgggcaggtctccgggctgcacacagttggggactgttttaagctgctcagtgatgagtgtccttgctgtgaagtatttctgtgtttttcatgtttgtccagagtggccacgaggtcctcctaagagactttgatcaatgtatgtttctacagaaaatgttagaagctgctgctccttcacattagctaatgctggatcttgcccatctttcttccttgtgccaatctgctggcgaaaaattgcttgtctatattttcatcacttttatgtatttatttttttaaaaaagacatgttcccagaagtcactgcttggaaatatctctggtcatttctcttgcttcttttagtttctgggtgaggccagtggttataagccagttcctgagtctttggacagtttaatgggggcatggatcaggtcgcagatagcagactttgatagcactttgattcaatgagggcctactatgagctttgcaggttttatctcattcaatattcataaccacctgaggagctgggtgctatttatccccattttacaggtgaagaaactgagaactctctcaagtcctggtggatgagggacatagtctggatttgaacagagcatgtggccacctgagctcacactcctggtcagcacaccatgggaggcatggggaggggaaggggtgtgggagatggccaggaagacctggtctggatcggggctctgcttactggctgtgaggctctggacaaagttatgtgacctctcagagcctaaatttccccagctctcaaatggatatcaggatatttaccttgaggttgttgtaaatagaaatggagatgtgtatgaaggccctggcataattcctatacttcactgatgcttgataaatgatggctgttttctgtactattagcaatgattattaatacagtgatgaaaaatacagagcaaagatgataaacagaaagtgtctagaagatagttgctacctgagagttagctattgtttattctgttaatgtgttacagtgtaggtatttctacattcagtaacatcataagcaaagaagactttgcttgccaagggccctattgaaagccctcgatgggtacaggctgttatctcaccaacacagactctgatccaaggtgaccaggagaattttagaatgatctaggcaaggaaattgccgtgcttccaaagcaacctgctcctcaggctccctgtggggctgtctgccccagcttgccacacctctgcaggtttgtggctttgtttcctgtatggggtctgaaggtgagcagtacctttgtttcctgtatggggtctgttctgtgttcagaagcaggactcagggctgctggagctggagctggagcctctgagtcctcagggttctccacagctctcctgaccagctctgctagagcgatgtctctggcagatgccttttccctgttgccctgtggtctggcctttctgctgtaggttaaagaaatcacagtgtgggcaggtggcctagtctgtaagtgtgtcctctagtgacctttgttttacctctagccatgcttgctgtttgtcctttcttgggattacatagttggccaggccaaaacatcttagctcacatgaaatccaagttcacagctggtaaaaatgccacagattaaatgctccatagaaattcatgtctataatggatgcatttctcctgggaattcactccttaaataggatgaccttgtcattgactcctgtccctaccctcaaccctaacgtgaacaaatatgaaatgatccttaaccaaccaacatgctagaataaagacacaaagcattaaaaaaaaaaaaaaaaccaacaaacaatgaggagggaggagtaattcttttggcaaaacttgattccctattgtggttgatgtggctgcattctttttgctcgttgagaagttgctagaagacagggtcagtggtggttctatgagggtggctaccatttttcttgagggactgcttttatctgccaagcacatagttctttacatactttatcttcctgaagcctcatgagagctctaagagattcccattattattatccccattttgagcatgaggaaactaaagctcagggaagtatgggaatagaaaactacatggccagggtctgaatccaggctgttttgctgctggccccaaggtcttagccccagtgcatactattaaatgctgcctgagttccttgacacctgcaccactacccctccttccaccaaccaggtggggttcactggtataagctgtcttagcatgttgaaagtgctcttgtagtacttagaaacactgtcatttaactgctatttaggttcttagtagttgtagctatgttagatggatgggccaagccatagccttgtgaggacagggacagtatccagtttgttatccatcccttatctatgccttatacacagtagagtctccataagtgctgggtggatggatgggtgggttggtggtggatggatggatggatggatgggcaggtgggtgggtggatgaatggatgatggatgatggctaagtagatatatgagtggataggtagatgggtggatggatggatggatggatggatagattgattggtagatgggtggatggattgatggatgattgctaggtagatatatgagtggataggtgggtgggtgggtgcgtgagtggatggatggatggagattgatagatggataggtggatggattggagaatgggtggatgggtgggtgaatggattgacggatgatggctaggtagatataccagtggataggtgggtggagggatgggtgggtggatggatggatggataaatggggatggatagatggatggatggatgggtagatggacggatggataaatggagatggatagatggatggatggacgaatggatgggtagatggatggatgggttgatgatggctaggtagatatatgagtggataggtgggtgggtgggtgagtggatgggtggatggatggagattgatagatggataggaggatggattggagaatgggtggatgggtgggtgaatggattgatggatgacggctaggtagacataccagtggataggtgggtgggtggatgggtggggtggatggacagatggataaatggagatggatagatggatggatggatggatggatggatggatggatggatgggtagacggatgtatgggttgatgatggctaggtagatatatgagtgggtaggtgggtgggtgggtctgtggatggatggatgagtgggtagaaatccaggcagctggaaggacagtggtggaaggacaggtatttggaaggacagtcatttgaagaggaaacaaagacatagtatttgaggggggaattatctgcacagcccccaatttgctgacattagctcctggagaaaggagcacctgcaggatgagcatttcccacctgtctgttcttttctcttggccaagaggacctcacagcaatgctctggttacagtcaggggaaggctgtactgaccacacaaagttccaagaggggacaagcatggtgtgacctccagccaacttgactctctcatcttctccccacgttcctaccttggacctcttctgggctggccgattgaaagagaatattcataaagctgactttgaggagtgttttgggaggcaggcacaaagattattggtattgagtcccagttctataacttactagctgtgtggctttgggcaagttaatccctctctctgagcttcagttcccatcctgatgccaaccttgggtactgctgagggaggaggggagaagggggatggatgcacatgaatggaaggcagtagcagttgttaattccccttatctgactttccattttactaccttcatttcttttctcttagactcttggaagagatgtactgtgctgggatataaatttttgaaacctgttctctttcctcttccatgttctccgtgataatgcaggaaaaaaactcgcaaacctggccatgatgcccctaggccgacagaggctttcctagttccaattctggcattgtaagagagagctctatggaatagcaaaaaacaggcacacttcatcctgtgcatgctggggttgaggctgtgaggtgtgcaacaggacagtagagcatagcagatgggttgatgagctgtgatctggattcagacctacttgtctcagaccctgggtcagcccgtcagcagctgagcaatattgggaaagattcttaaccttggatggttggtaggatcaagtacagtcagtgtagaaatgcttagctcaccacatggactcaggacatgtcaactctccctgctttggctataattactatcctactgtcaaggaactttctctctagttgggctaggtcatgtgcgcagaagggttggaggacaaggtgttgaagaaagatttctccaaagatcctggttggatgtgagctggatagagcaaggctggagagtgcagatgcccctggggccaggcggtcttcaaccagtcttggtgagaaatagtagctcgactcagctttggggtgcagagacactggggaggggcggggactgtagcaacctaaagtgctcctgccctgcctgcagaggatgatctgcacagccctgctcattatgatgacatgggcatgtgcgtgactgtcagctctttggttttcaagagaatttggaagtctaggtttccatgcatcaaaccagtagtagagaaggcaaccatggggagaacctaagtcttgtttctagagagatcatagggttgtaaattttaccttgcatctcagagaagggcagtgctattttagattagggaggttgcaaaggtgatgaactccaagaacactgacaaataccattatcattgcaaaagaatcttaaatgtgtctttgaaaagcaagcatttggcttctaagttgtaaaaatggaccaaaaatgaagcagtagagtagggactcataaccaagtttatgccattattgttacaggtttcttttactgtgtttctctctatatatatgcacatctatataaatatagatacatagatatatggggagaagatatagatagagataatgtatgcatatatatacatattatatttgtctgggttctccagaggaacaccatcaataggatatagagatttatctattgcctatctattcatctatttatctatctaccaatccatccatccatccacctctgttcatctatccatccattatcgtatctatcatctatccattcatccatccatgtatgtatgcatgtatgtatgtctctctctctctatcattttcatccattcatccattgtctgtctatctgtctatctagatgtattagaaggaattggcctatgtgttgtggagtctaaaaagtcccagcagtcagcaagctgaagacctgagagagccaatggtgtagttctagtgcgagtttgaaggcctgagaaacaggagagctaatggtgtaaatttcagtctgagtctgcagaagactgatgattcagctcgaagacagatagagagaattctttcttattccgtcttcctgctctattcagtccctcaatggattggatgaggcccactcatgctagggaaggccatctgctttacccagcctattgattcaaatgtcagtctcatccagaaactccctcatgggcacccaaaataatgtttcaccaaatgtgtgggcaccctcaggcccagtcaagttgacacattaaaggaaccatcccatgcatatctatagattgtgtgtgtatgtacatttgtgtatatataatatataattatcctgttaaggatgtctcacagccttgaggcagagattaattgtgacctggtggtttccaatgtttctgtatatacaaataaattatgcagcaatgataccctagtctcattttattaattgctcttctattagtctgtttaaagtcaattaaacctcccaaggcccctcacggaggaacctctcacaaaatcagtctctgtcacttaggaatcctgagtggatgtcacatggctgtcctagctcctggggagggtgcagacaacatctctgttggaactcctgggtctgtgggtgatcattggcttgcattttgtagtggcatggcccgtggaggtccggatgtagagaaggcagcctttctgcagagcgttagaatttgggaagaagtggtcaggattagagaggaaaaaaaagacttagacatggacaaggatgccaccccagcttacccttcctctagtttcctggacttttgcagggttcggtggataattagttatttgcttgcttggttggtatctgttcacttttatttcttttagactttttttttttctgattagaacaaaaattatatttattattgaaaattcagaatacataggagattatcaagaacatcaaaagcattcacaaatccccccacccccaccccagagataacccctgtggctacttttgtgtgtgttcctccagtacttttcctatagaaacatttttcccgtgtcgggattgttcagcctatatcctttattaaattaatacatcagaagcttttctccacactgcttaggacacttgggaccaaatgctccagaataggaatttgccaccatttattttcccattctgctttcattggaaactgagtctggcttgaggcttttgtttgcttctttcttgctatagtaattgggatggacttaaggctgcctgcctttttgtgtacatctctgattatttctttaggctaaattcctagaagctggaacccggggcagaaggaatgaagattggaaacccttggtgcatgacagcaacttgctgtcctgccaacattggggcgtttgcctacagaaagagctctctggttgaatcaaagaattttaagaatttaattcttcttcttgttttttgtttgtttgtttgtttgtttttgagacagagtctcactctgtcgcccaggctggagtgcagtggcacgatcttggctcactgcaagcaccacctcccaggttcacaccattctcctgcctcagcttcctgagtagctgggactacaggtgcccgccaccatgcccagctaattttttgtatttttagtagagacggggtttcaccatgttagccaggatggtctcgatctcatgaccttgtgatccgcccgcctcggcctcccaaagtgctgggattacaggcgtgagccactgcgccggcctaattcttcttttaaaagttggggatcagagtaaggtgagaaggtatcctgcacagcatcaatgcacacagcgcacattaaatgagtgctattccacttcatttgtagtattttttttcccatttgtaggaactacttttgtgcctgacttccttgttcctttaaatgagccttaaggaagtagtgttgggggaattcaacacacacagagcagttggtctttattatgattttaagcatcttgttttcatgtgagcaccccaactttgccttttgctaaattttgcaacaagttttgagtaattctgcacaaaacagtgcccttgctccaggaggagaacagacatttgctcgttcttcacaggataattagactctaaaattagaagtcaaacactgcatgttaaaatgcatctggataaaatcccagtgggagaattaatccttcttggcagtgcaggggaacttgggtgcacgcctgatggagcggcgagaagctgagagggagtgaggcagcccctctgtgtggagtgttcagggcaaatgcacgggtgctggtgacgcagtccctttacttgtctaaaagtattggattctaagtgaaaaggggggtggggatagaaggccttctgcctcgcctcctgtagtcacagtttggatatcctgtgaaagtagcacttaggcaggcattcggtcctgcttggcgttgtttggtggacttgttagagaacactactgactgtgtttgaggaaggaggtggagcagagggctcagggcttaagcggcatctcctcaagggcagcaagagacctggaacgttccagagtaacccctgcctgcatccgtcggacttgccaatacacactgagaaactgctaaaggttatggatgcaatggaggcttctggtatagtggggaggaaaagcctccattatgaagtcaaaggccattgcgtgcctgcagtgtgcgacaagagctagtggttgcagcaccctgatgggcagaagcttccctcacagagctatggtgatggagaaggcagctgcaaatcaagtcattaccagcaaggttataaaattatttgattgcatttcgaagtgaaaaacagttttgaattaacttctatttgttgtgatataaacaacagatataaaaagatataaaaggaaataaacagtgaccatgacattggttgttcagtttcaacactatcttcgggttccctggtccttgtcctccctcattcgcctcccccaccactgaattgtagactccaacagggggcgggagctgagtttgtttttgctcccagctgggactccagggtctagcactggcctggtgcttagcagcctgtagcaagtatgtgttgaatgggcaaatgtatcctttggcggtacgagacagaagctggtggtcctgtgctgcctgtggccagagcacttccagcatacggggccaggacacatttgccctggtgtcccaggttgctccaggcacaggctgcacctcctgggggctctccctgcaccagcctggtggttctctgtcgcttctcctgcaccctgcgccttccctttgtgtcacatccctacctcatcgctactcatttgttggccagtgttttttttagaggatctctttttataaaatttcagtttttattttaggttctggaggtacatgtgcaggtttgttaccagggcacatcgcctgatgctgaggctggggcttctgttcattctgtcacccagatagtaaacatagggcctgacagcacgtttttcagcccttgtccccctccttcgctccctccctttctctttcggagtcccctgtgtctgttgttctgtatgtttgtgtgtactcaagatttagctcccactcatgagtgagaataggcagtatttggttttctatttctgcgttaattcactcaggatagtggcctccagctgcatccatgttgctgcaaaggatatgattttgttcttttttatgttagcagatctttttttttttttttttttttacccactctctgattctccatgcatcatgagtcccccaaaggcagggctgggttaacctccctgggcccagagaacaggtgctcagtatttttagaatgaacaaaagttctcttgtggaatcatgagggaggtggagggaggaaggaaggagggaagacctctgccctggctctttctcctgcctgaaacagcctccctcagatcccagcctgtggcgcctttctcgtcacgtgtgtgtccgccccacactgccctccctggcctcggaggctaaagcgctggcccctgccagcctggacctctcctcgtcctgcttgatttgattctgagcgtgctcatcaccatctggacatatgttattcacgcacaattaaatgttgcttatattgcatataaaacataaatttatataatgatatacatgtacatatgtgtgtgtggcgtgtgtgtgtgtgcatatccctgtcgacaccaccagaatatgttttaatgaaaccgtcatgttttaatgaaaacagaaagccttctgtttcatgtcgtgacgctggaatgaaaacagtctctcccagcatctagctcagtgcctggcacatcatgaaagcttaataaatacggctagaattaatgaatgagtttctttcccctcccctgtcctgtatttttaataaggctgttgagcctggggcctctgccctctgctggtcactatcatcacacagcctcactcaggaggcccctggccccgttctgcctggagtgttggcaggtggcaagggttgtaagctcctgcccagtcccgtgggcagttctaggatcttacccccagcccctgcgattctgaggggacgtgtcagtcattcagcctccagccagtccctggggatgtctgagggaggaagtaaggctcaagtcccctgaagtgggcagctcctgtcatccacagctgctgcttgttagtgggagccctggggccctgggtaaatgtcctgccagagctgggctcactctggcctcctttgtatacctgggggcaaggtttagctattcagcaagggctgttttaaaaaattgggttggttctggatattataatacctttttataaaagaccacgaagaaaactacattttcttggtgacttttacaataggagcaagttaaattttctttcttcactgagttgtcattgttgccttttttttaaaatcagtttttccctgtcaaaagaaagtaccttaccatgtgatctactgaaatataggagttacactgaacgaagtgaaaatgaagcttgtttgtcagtccttcctgctgactttctcaatctgggcccagtgtaccctgggaggcacagccagagcccagggagtgaatccgattgttcagtagatgcagttccccagttcaggccctgcaactaccagtccaggcctggaggggagcatgcatcccccaggaacatgactcggagctggaatctgactaggcataggagttaattgggcctgaggcagggagggtgctgggaagaacattctagggagagcagacagcatgtatgcatgcacacatgttctgtggcagaagactgtgtgagtgtttggggaggtatgagtgactctgaaagggtttttcccagtggagcacaaagatgcccgtgttgtgggaggaagcccaaggtgggaccaggcagggctcattaaagggatttttgtctttaaatgaagagcaccaggaaagcctctgaggattttaaacatggtggttgcagtcgggcagatcagcttggcaaagatttgatgactagggtattagtctgttctcatgctgctaatacagacatatctaggactgggtaatttataaaggaaagaagtttaatggactccacagttccacatggctggggaggcctcacaatcatggcggaaggcaaaggagaagcaaaggcatgtcttacatggcagcaggcaagagagagcttgtgcagggaaactcccatttataaaaccatccaatatcgtgagacttactaccatgaaaacagtaggggggaaccacccacatgattcaattatctccatctggccccacccttgacatgtggagattattacaattcaaggtgagatttgggtggggacacagccaaaccatatcaactagcatggagaggccagtgtggagtttagggtaccaggtggaaggccccctgaggttggggagggtggtgcagggcagcaggtggcagccaggcccttggaggtccattggcaggactgagcagcagggtgttggagtgacatgcaggtgggggtacagtcctcttcattcttattcacatcttttctgttgatccctttccatctctttccccactagtttcctgtgttcttttgatccacaagctccacatttcctgaaagaaatgaatgccattattatcacatacagccacacacacaccctgtacaaactcatctcccacaacgcccaactccctaacatggttgcctaaatcagaattaagctccctggattcaggtcccagtcccacccttaatgtgcttgtgaatctcaatgaggtgcttggcctttcttggctgggtttcctcatctgtgaaatgggggattttgcactgttttatttttctactttttgccagccttgcaactttccataggactttgcttcatctagactgttggtgtaggaaaacatccttttggttaatggatagatgttataggctaggtgccttccctccaggaggttcctcatcttattagtgaagattctgtagttgcatatggctttagttgctgttgagaaacctacccagactggcttcaccatcaaaggtatttattgactgacaccgttttgtgattagtccagggggagtttggcttcaggcccattgaccacagggtctaattatactgttcaccattgcttctcgtccctctcactgcctggttctctgctggcctgctgtgaggccacatttccttctcctctgttcccccaggctccagccattttgaggaaggaggtgagtttctctttcctattagtgaagaataccaaagctgtaggaatcatatcttactggcctggaggtggtcagcttctttaaaatcacatggcctgattgggcaaggggtaggtcccttgagggaaatcaaggtgctgaaccagaaaaggtggtgatggcaattgggtaggaaaaaataagtccatctcagagtctttaaaaaacatctttaaaatctcctcgtgatttcttaatcagcaagagggtggcttaatctgtttatcccagaggccagggatggagggtcagggaggggttgaccttctggggctgatgatagcatttgtttttcttcccagtccaggcttacgctgaccttggtacttaaggcagggcctgtcctttcctctgctcagcaacatccatcactgccatgtccttttggcactaattaaagaggacacacttggattaggaaaatgatggattgggttgatgtgatttgatgtgaggtggagtgaataagtgacaagctcgcccttagagaaaccacctcggagtagccacaggcagcctgtgtcccccataggagggactgggacagcttggcaaccacctaccccagaacacctgctaggaggagagagtcctgttgttccggcttgggaatgtctgtgtttacatgatgaggctgggaatataggcatcgaagcatcagtttcctttgctccatctagatcagcgttgttgatggatgagtatggtaaagagttggatgattttcccccagagtttccatgctggacaattgtttatttacttgagctaattactgaaatttttttccatgacttggcctaatataaaaaaagacactaatgagagtgaggttttatggtaagcaaattgaaaagcaaatagcaaataactcatctatgaaatagttataagaaaagttattatggtaatggttagggcaaaacaactctatttaattcttgatgcttatggagattccagccaagatatgtgtattttccttaaaaagatttctttaaagcatgtgtcttaatttaatcctgttatacacaggcacatctattaatgaagtaaattcaacaaagagttaattataaatagcagcaacatgttttctttctttaaatattgtatatatttcatgttgtaactcgggggataaattatactaggtggattttgtggtaatataaaggacggttggaattttattgagtatttacttttatttggttttgaagaagagcttctccatacctcagactatcaaaaatcattctgttagagtcacagaaattccaattaagagcttagatgccaatacagactgattattttgaagacttttttcagttcatgactcagttaatattcagtggtgtattttctgtagtttaaaagtatcactgataagttgggagtatgccttccatatgagatacaaattgtccctaaccactcaatcaatgtttactttacatgttaaaaataagaaactaagacctcataatgtggttttaaaggttcctgttttttgccctgaaggtccaaaggtaaatttggcacatttgtcaaaatatagatgaataatttatagatgtgcatccattttatttttataagtatggaaatagatataaagggatttgctggaagaatttcttttggcaaatgagcaaaaaatttaactataaagaatgaaatactaggctctagatataaaataatattcacaatgcaatacaaaatgtgcaggcatttttggtcatattttctatgacaggtttcttagaaatctgtgtttctactatgaaacacatgaaacaaagaaatatttatacatcagcagaactataaattcaaaaattcagagaaaattccaaatgggtgtgatgttgatacttgcatttttctctaaaattaataaggtatgtgtgtatatatctgcatatacctatgattcatgtaaagggttgcagatacaaagattctaagttcataggtataagaataaatatatgaagctgtatcctgtcttttgcattatattgattgttctcgttggggggagggcgttaattttaaaaagtcaagtgaaagtaaattttcccatcaaaggaaggcactattgctttcaaacatcatcatattcaatacaaattaaaacaatgaactactgtatctacccatcagactagcaaaaatcaaagcatataacaatggcaagtgttgccaaaggatggagacctgctgatgttagtgtaaatgggtgtgaccgctttggagagcaatatgacctatcccgttgagctggggacactatgactcagcaatgcttctccaggccttttccctggagaaaatcacatttgtaagtggcaagagaattatccaggaatgttttccaatgcgttgatagcaaaaaaaaaaaaaaaaaaaaagtctcaggggttgggggtggtgggacagaccgttgatagtggaatgagaaatcgtaaacaagaaggatctacccagaagttgccctagttgttacctctgcagtgtggcagggttgggggctatgatagggcttctgaggtgactgtggaggcttacatttgatctataatgttttgtttttttcttgtgtcttttaacaaaaagaaaacctgatttaagcaagatgtcaagatgttaatctttgttaattctggctgttgaatgcatgaatgttgtgtgtgtgtgtgttgaaactgttaaaaaaaaatcatctttgggttgaccatggtggtgtacacctgtaatcccagcactttaggaggccaaggtgggagaatcatttgaatcaggagttcgaggctgcagtgagctatgattgcaccactgcccttcagcctgggtgagagtgagactttgtctaaagtaaaaaatgtaaatgaataaatacatcctcccattacattacattttctaaagtagcgtaacttttcatgtcagaaactagaataaattaagtcactgaatcatgtagtaaattatgaactattgcctctatagttggttgccaaaatggcctgccagtgtctattaatcaatataaaatataaaaatagaacatttaaaaattaaagcatcatgttatattgccattaccagctagccatatgaaccttatggaaggaaatctggctatatttagcaaaattacataaatagtccccctttggaccagtaatcccacttctaggaatctatcccaaaatatcttggcaaatggtaaaatagcacacaggcaatggtatttgttttgccattattcattatagcaaagtgttggaaacaatgcacatatcacgaagagtggactggctggataaataatggcatagccagacaaaggggtatcggaagacaataaaagaaatgagcgtgttctctctactcacatggaagtcatctccaggatatatcatagtattcattagtcagagttttccagagaaacccaaccaacaggatctttttggtaggtaggtaggtaggtaggtaggtaggtaggtaggtaggtaggtaggtagatagacggatagatatggagatacatacagatataaaaggagatttattatgaggaattgactcaagtgattatgaaggctgagaagttctacaatctgctgtctgcaagatggagctccaggaaagctgatggtgtaattctagtctgagtctgaaggcctgagaaccaggggaactggtaatgtaacttccagtctaagggcaggagaaggtccctatgctagctcaagcaggcagacaggaaggaaaaaaggctgacttcctcctttatctacctttttgttctattcaggcctctatcaggtcggatgttgctcactcacatgagggaaggcatgtgctttactgagttcaccaattcaaatgctagtctctgatagatgtggtggctcacacctgtaatcccagcactttggggtgggggcacctagcagggaggatcacttgaggccaggagttccagactagcctgggaaacataacaagaccccatctctgaaaaacaaaagtaaaaaattagctgggcatggtggcacacacttgtctgtagtgccagctactcaggaggctgaggcaggaggatccattgagccctaaagttcaaggctgtagtgaggtatgattgcactttgtgccactgcactccagcctgggcaacagagtgagaccttatctcttaaaataaaaaatgctaatctcatcaaaattagcattaatctactctataatttccattagattcttttaaataattagataatttctgtctctttattgacattatctgtcatcataccttctctttcctctttaagagtgtacattttttcatcgagattagcattttttaagatctggaaatacccttgtagacacgtccacaatccataatatcatttaatctggaaacctgtggccagattgacacataaaattaacatcacaatcattgagtgaaaaaaaaatcgggatatttttatagaatactgcctttcatgtaaaaaagagatgtgttcacgtgtgcattttcatgtgtgtgtgtacttagattgtttaaaataaatgctgggagtaaaaagcgagcactaacggttgcctatagtggaggaagtaacagaggggagggcagaaatagaagtgagacttctatgagtgtactttgttatatgattctgaattttaaagtgtgtaaatatttttacatattcaaaaaattaaaagggaaaatattcttataattgaagacagatggaaataattgaacctaactatatatcaagttggtagcttaacccgagaaagtaattttttttttttttttgagatggagtcttgctctggcacccaggctggagtgcagtggcaccatctctgctcactgcaaccttcgcctcccgggttcaagcgattttcctgtctcagccttctaagtagctgggattagaggtgcttgccaccatgcctggttaatttttgtaattttaatagagacggggtttcactatgttggtcaggctggtctcgaactcctgatcctgtgatccacctgccttggcctcccaaaagtgctaggattacaggcgtgagccactgcactcggctgtgagaaagtaatttctttaagtaacactaaaacccagtattttaactgtatatccatagtggggtggaatttaaggatgctagcatatgtaaataaaaagaatcatatatttcatgattagtgttattattagctgtaatatggatgttattattttgaaattataggactaacttggagaaagcaattaagcaatatgttaatgttgttatgaatcaagattcttattatgaaagaaaagagataaggtataatattttttaaagttatctgaaatcctaaaatcttacatttaaattagaaatattaatattcatgatattctttgctcttaaaatatctatttcataactctgtctactgaaaaagcctaaaagcagtgaaaaccctatagcaacgaacgctttctacacccagattttgtgtactaaataccattccccactaaaacgaagcagagttccttggagaagtgactgcttcctggtctaggatactttattatgccagaaagcaaataagctatcaaaggttaatgagatgattgcaaaagaattgaatgattttctgctggctaagaggaattgcttaatacatttccaacaggataatgactagaattgattgaaacacatcagaattataaaaatctgtgccttcagatggtacttcaaaaaataattggtcaccgttgtatattgctagaacaccagctctctattctgaaagttgctaaaaaaggaataagaaacaagcttttattctgccttcctgttttatttatatttcagggtaaccaaatagctgatgattgaacgtcttctttatagaaaaattttaattaataaatgcaaaaggaaagaatgagaaaattaccatttgacaacccaaatgaaataacaggtgtaggcaattattatcaataggtgttaacagcattaggtaactatcaatggggaattttataatggataaatcaggctgatataacctgaatgtactgatctcattttacctctctaaaggtaggacaaccagaagttatatgcctcctaatatgtaattggaaatataaaccactgcctctaaaggattctttcctaaaaaattaagcctgaatgtgaccaagcttttaaattttactaccagttttcaggaaatatggaggctaaaggaacgtgttaacaaattgaccagcttctcaaataaaatatggaaaagtcacatcactccagaaattttcccagtttactcttcgagccaattcctccttagctcacagagacaattactttccatagatctgtcaccatagattatcacataagtgcagtcatacagttggcatttgtgtgtgtgtgtctggattccttcactgaacataatattttagaaattcattcagtgtgtgtatgtgtgtgtgtgtatgtgttggtttctttgttttattgagtacttcattgcatgaatatcccataatttgtccagtctctcgttgcatatttgtgttttttccattttctggctgatgtaaataaagcttctgtgaggattcttgtacaagtccttttgcggatctatgtttttattttaattgtgtaaattataaaagtgaaattgctggaacatagggtaggtttatgtttaaaaagaacttccaaatagttctaagtggcatgagttctagttgcttcacacctttttcaaaagtgagtgttatctttcatttaattttcccagtcaggctgatatgaaatggtatctcattatggtttttaaatttttttatatatagctttattgagatacaattcacatactatacacttcacacttttgaaatgtaaactttaattgttttaaatatctttccagagttgtgcaactatcatcacaattggtagtctttggctttctaggagtttgtccatttcatctgagttactaatttattggcatgcagttatttatagtattcccttataatttatttctgtgatattggtagtgttggccccttttacactcttgattttagtaatttgagtcttctctctctcttctttatcagtctagctaaagatttataagtttattgatccttcaaagaaccaactctttattttattgattttctctgttgtttttctattctctatttcattaatttctgccctagcctttaattccttccttctgaatgttccaggcttagtttgttcttctttttctactcttttcgagtggaggatttggcttttattttgagatttttcttttaaatataggaatttagagctataggcttctatttaagcatttctgtgactctgtttcataaattttgcttcattgtttcttcattttcattcatctcaaagtactttctaatctcactcatgatttattctttgactcattggttatttagggccatattgtttaatttccatatgtttgtgaatcccctaagtttctttctgttattgctttctaatttcattccattgtggtcagaaattatactttttatgatttcaattattttgaatttattgtggtttgttttatggcccagcctatgatctgtcctggagaatgtcccatgtgcatttgagaatgtgtattctgctgtttctgggtaaagtgttctatagatgtctgtcatatggtatatagttcatttatactgttgttcatcttttcttttttctccttaatcttctgcccacttattctattcatgagtgaaagtgggatattgaagtctccgatttttattattgagttattttccctttaactctatcaatatttgcttcatatattttgggggtcttatattaggtacatatatatttatcatttttatgcctccctgatggattgactctttcatcactgtttcaccatcatctctctatatctatatctctagttttagagtagctttatctgatattggaatagccactctagcttttgtatgattgctgtttgcatgctatatctttttccattctttacttcaaactgtttgtatctttgaatctaaagtgttttctcttgtagctagcatatagtagtatcagatttttattcagtctgacagtctttacttttgttggattgtctaatccattcacatttattgttataatggatatagttagatttgcatctaccattttatttttcattttctatatctctcatgccttttttgttcctctatttttcctttactgctttatttggccttaaatgagtatttttagtgtaacattttaatttctttaatcattttttaaaaatttattttcttagtggttgctgtggggattaccatatacatcttaacttatcagaattcttcagattcatactaacttaatttcagttagatatagaaacattactcctgaatagcatgattttttcttctacctcatttttgcgctataattttatacatattacatctatatgctacaaactttacaatacattgttacaattaattattactttatatgaatttatgtctttcaaggaagctgagaaaataaagagcaagtgctcatttacagagtctgttatcttaaccttttaatttaccatttccggttctcttcatttgttcttgtggattcaagttactgtcttgtgtcattttcttactccaattcatctttgctcccatatacttcctttgcgttattgtcaaacattttacatttctgtatgttataggcacaatgatagaagtgtgttgtgtgtgtgtgtgtgtgtgtgtgtgtttgtgtgttattttatgcaattgtttattaaatcagtgaacagaataaagcagaggaaatatgcattcaggctgtctttcataattacatcattacctttactggagctccttgttttgtgtgtgtgtaaatttgaattactgtttggtgtcacttgatttcagcctcaaaactttcctagcttttcttatatggcagatcttttagcaatacattatcctattttatttatctatgaatgtcttgaattcactttcatttttgaaagatacttttgctgggcataacattcttggttaacagttgttttattttctccttcagcactttgaatatatttcatcccactgccttttggactccattacttctgatagaagtctgctgttaatcctattgaggcatccttgcagtgactagtcagttttctcttgctattttcatgatttttctctttgttgtttctcaacattttgatttttatgtgcttgggtgcaggtctctttgcatttatactatttagaatttgttgagtacctgggatgtatagattagggttttttcgcactaaatttggtaggctttagccattatttctttgaaaaaaatttctgcttctttttcactcttctcttattctggtactcccattatacatatgttggtccacttaatggtgtctacaatttactaagcctatgttcattttacttcattctttccctctgctcttcagattgaataatctctgactgtcttcaagttcaatgattcttttttctaccaattcaacaaagccactgttgatcccctctagtgaattttgaactttaattattataattttctactgtataatttacattagattattttaaataatttctatctctttattgacattatctatttgccaacataccttctctttcctctttaacagtgtacatatttataatattttggacatatttataatagttactttgaaatctttctaagtctgacacctgggccctttcataggcagcttcttttgaatgcttttttttaaatgtatttgttgcactttcctgtgtttttatacatactagatttttttcaaagctggacgttttagtagataatatattttagcaactctggatacttgttttcttttcctctgagcttgccattgttgtttgtttatgtgttttgtgacaggaataggctattttagtgtttatttctacccacagtgtggagcctttggtgttacttttctgacgctgcagccttgggagtgtgcacagtcaccttgagatgatagtagttttagcatgtgtctctttgacttctctcttctgcctccttccttaatctccctgttaatctgtctgcctctgttggtatcataccaagctattaggctccactaactgccaaattattgctccattatttttgacaatgtccagggcgcatgcattcctctacaacctgatccagttaaatttgaacccctttgcaaaggtattttttgaggtcagtctttgaggtttgaccaagagggctcttcttagctgtcttgctctgatcctctctgataaactatctggcctacaatttagcttgttgccatcatggagctgtcagccttctatacctgttttcatgcttacttgtcttttttttttttttttctctgcctattctgtcattaagaccatctaatgaatgttttaaatgataatatatttttcattatagcatttccatttggatatctattgcagtttccatgtggttcattttaaaaatctcttcatacatgtttacctttcacacactatttttaaaaactgctatcacgattatttcaaagttgtgtgataatttcaatagctgggctatttatgaatcttcttctattgtctgtttcctctttttgatcacaaatcaaatgttcttgcttcttcaggcatcatagtttatactacatgtcaggcattctgtgtcaaataacagcacattctttttctttccacttatcagagttggaacactgagtcagtcgtacctgtagatcagctgggtctgggactttttttttttttttttttttttgagacagtctcgctctgtcaccaggctggagtccagttgtgcaatctcagctgactgcaacctctgcctcctggattcaagtgattctcctgcctcagcctcccaagtagctgggactacaggcacgcaccaccatgcccagctactttttgtatttttagtagagacagggtttcaccatattggctaggatgatctggatctcttgacctcatgatttgcctgcctcagcctcccaaagtgctgggattacaggtgtgagccaccgcaactggccgggtctggagctttttgtagctttagtttcattccatgtattaccagcttcgagtgcttagagggaagggtcaggatttttcccttaccatagcttaggctctgagcactgagtggtttctttgtactttatatctgcagtactagctttctgaaccttggagtgctttgaccatgccacagcccggccagcagatgcaggggtcacagagagctacgtttgttttctagtcccactggagtgctccctctgccctgctactcagactttgtagggcatctgtcctgccctcagtaaagacttgcaatgccctggagaggtttctcccagctgtcttccctgcccccagccttcaataattgaatgtccggagttcccaggatagatttctcttgagtttcctccttagccccccactttcagaggacactgccttttacttaggtgaggccccacatatctctggggttcttgcaggtttcttgctttacctccaggaagacctgtacaaaacagtatccagtggttaaaaactcactctgggctgggcgcagtggctcacgcctgtaatcccagcactttgggaggctgaggtgggcagatcacgaggtcagaagatcgagatcatcctggctaacatggtgaaaccccgtctctactaaaaatacaaaaaattagccgggcatggtggcggatgcctgtagtcccagctactctggaggctgaggcaggagaatggcgtgaatccgggaggcggagcttgcagtgagccgagattgcgccactgcactccagcctgggggacagcgagactccgtctcaaaaaacaaacaaacaaacaaaaaactcactctgtggcttgggcttcttcacattctaatctgtcatctggccaccagaatttcattaaagtatcagcaagtttctccttcctccaatctatggcaattccctgttattgcactactgtcaggggtgaaagcagtcagctggcaaatgccttaaatagtgttttctatcacttcatctccataatctggatttcatacaaaagttagtcatatataaacactgagtatctacagcaagaacatcattctcttggagagccagaaagtgagttgttttatgaaacatttctaatttagtcaattttccaaaaatagggaaattatacaatagtcattgcctttgcctatgaaaagtagaaagaagggaaatcaggagaccattgcttcatctgtgggaaacactttctatttgtccttacatatattctttgtttttccataattctgagggataaggaagagaatgtggcagcctgaatgtctgtttgactgtatctcttcacactgtgattctcattttcctaatgtctgtttcagaattttaaagtgggcagtggattatgccagtttctagatcctcctattaccttccagggaaaggaaaattggattcgattctaggggcatgattagcagaagggcacgcccgggtaccgtgactttgttctgaattaaggaagtttgagtaagagaaagcactttttcctgctggactgggctgcttgttgatggctgtgccgttaggagtgtggagcaggatggtgtttcagacagaggtcctgagcaggagagagcaggatgtatggaccaacgacaggcccatgagtctggaaggtggggaaggggggagcatgcacgttgctaatggagagagcacgtctcagaggctgcatcctggcggctttgtggtcatttgttataacagccctaggagactcacatactctccttcaccctctcacagccattccctgtgagaaccagacagagtggctgagttcatcctgatactcaatggacaatggacaggaccccctttttaggacttggttcttcagccccatggcacaatgtgtaccagcaaatgggtttggccaggtcctcttaaacaagcttcaaaattgtccaacttggacttccacagggcttctttctgtggccagagatgccaatacatgtgattttctgcatgcatgtggtcttggctccttggactccaggttggccacgcagcgacagacctgcctctcggtgggagttctcaggaagtcaaatcagatggaaacctgatctgtgtgcacgactggcttcggcagttaggtggtgtgaaaaatgaaatttctactggcttctcttgtccacagggtgaccgctagtggcagggctgcttgctgcggctcctaatctccttgtgggatgccttgggttggatcagtttctcttggcccctgtgaaaggaactcgcggtggaatattgtattcggtgctgcacaggagaccccatttagagacaggaaacttgtgcttgaagggcactctttgtgcagctacagacgattcattcattccttcatttattctgtcaccccaaatctgtctgcatctactgtgttccaggcaccgcacagggcactaggattctggtggtgaacaagaggccggtctcaccctcaaaggcatgtagtcttgagagacacagacactagacaaggaatgacacatgggtgtatgtgaagatgcttaggatatggtgggggcatttagcagggagatttgacccagcttggggtggggtgggggacacagaggcggattctatgaggaagcagcctttaccctgagacctgcagtgggggagcattccctagatgaggaatgagaggtggagaggaatgtggagcaggatggtgtttcagacaggggtcctgagcaggagagagcaggatgtatggaccaacgaaaggcccatgagtctggaaggtggggaagggggaagcatgcacgttgctaatggagacagcacgtctcagaggctgcatcctggtggctttgtagctttgtgaagaaagtgggattttatccttaaaacgaaagggaagaagttggagctgttaagtagggagtgacatgatttgattgcttttttaagagagccctctggaggaaaaggggctggagggggcagggggtacagggcacggtggccgtttctgcaatcgctgaggcaggaggtgctgggggccagtcctgggctggaaatggggagtgggtgagggaactggactaacccagagtgttgcatgaggtgacattcatgccacatggtgacggacttcacagggagggtgaaggagagtatgtgagtctcctagggctgctataacaaatgaccacaaactggggggctttaaaccatggagatgtgttccctcgcagttcacggctctgcaggccagaggtctgaagtcaaggcatcagtagggctgaaacctgcccttgaaagtttctggggcaggatgcccctgggcctctctagcgtctgggggctgcaagccctgcttggctgcagccgtgtcaccgcagcctctgggcgccttcacgtggcctttactgtgcatgtctctgcacatcctctcctcctcttagaatgacacagtcattgggtttaggacccaccataggctagcatggtctcattttaacgaatgacatctgcaaaaatcctacttctaggcaaggttctgggtagacatgaatcttggcaggggaactattcaacctgctacagagagggaggcggatttgctaaggatggctccggctggctgtagcaactgggtggagacgtggaggacagaccgacgccagcagaaggacatcagggccactgaaccagaaacacacatggacgtgtgagtaagtgaggtgaccagacctagtgaggcccccagttcttttcaggttttttgtttgtttttaacaaatgagactgaaaatgtttcggttcactcttacttagtgaaagccgttcttgtgaagctgacatgtagtccagcgacagtgactcaggttagtaagggtgtgtgcttttcatggcgtgtcgacaccaagccctcacgcagagcaggctgactgacgatgccgcgtgcaggaggttccctggctctggggccggctgacctgggctgtcacctcagtgctgctgctttcgagctgtgtggccttgaggagggttctgggcttctctgagctgaagttatttccttgtgcaacggagatgaaaacacttgggaacaaggctgtggaaagacttatagcatggttgcacgtgcttggcaaagaaccagtctgtttagcttgcttgtttattttactgaaggcattatgtataacgattatattgtatattctaccaaacataccaacaagagtgtccaagatgttgatgcatattgaaacgtccatgttactctttagcataatttattgacaactgcttgttttcttgtgattctccctttttcctaaacacttatgagagaaaagccacacttaactgtaagttcttacttattaaggatagtctttatttagtagactgggaaagtggtggtagatggataagtaattaacaaatggataagaaaaatagtaggcttccccacaggaaggagataaggctgtgaacaatccacaaaaggagtgagtgtaaggactttttaattttgagagatattggatacatagttgttatctttctgttttcaaattcccccagcaacccacctccatggccatatccttgttccttgcatcaagcagaatggctcttcctccaaagtgaaccttgggcagcctactctggttacagtcctgcctgccaccgcctccttgtgaccttgtcctcccgccctcctggaggctcctccagggctgcttctcgtagccgtttcctggtgtggcttcagccacttgctgaccctgtctgggtccccaggatcatgcttggcttcactccccattggaccacagccttgaccttctcctacacctcccttcccaactccagacatccccctcctgatcccgggagccagtgcctcactgctggcagaaatcacataaccaagcttcaatacattttccacagccttggcaaaggccaaagggctgcttgccaatccttttgtgtatctcagtgtggcaaagttgttaagaccgtggttcaagtctcacctccacccctcactggaggcaccatacgtcttctgccaacctgccagatgccgcctttcacaagtcagcccctgaaatctgacattgtctgtgaagccttctgtctgattcatcagacgaaagtgaatacccgtgcggtatccattgcgggctgggtgcaggattctcctggacctttctgtgatctcaaccctctcgctggaattaggcacttgctcttgtctccttccctaatagtatactatgcttactttgcacctgatttatttggttttattttataatcaaatcaaataatttattccaagtagtctaaattgaagttttattttcaaaactacaggcataagcagtctttcagtagaatacccactgtagaaaaacttccttaacggttccccttgtgttgcagattttcaaggcttcaccattttcagtgtgattactaatatagcaggaaatccttcaagtatgtggctctctctctacctaggattctttctccaggacagattctcagacacgaatgtctgcagttaaatgccctgtgcttcttgagaaatgatgcagaattgccatttggaagggtcgtgctgacttgtgatgccaccaaagatactcaaaggtgtttgatttcactgcacctctgtgagaattgggaaatgggacagaacatcatctggggatacttaaagaacccgaaggtccttagcaccttgctcaagccaagtaaaatgaatttttcatattacgattttttttttccagcagattttaagctatctacttgggggcagaaataagaaaaagcagatggtaggggcaatgaggttgtggtggagttcgagggagtgattgaatcttgggtgctggttggaaatactgcccatgggggtctgggttgaattggatggaaacaacacttggagaagcctgcagaggggctgagaggggagggagagcctgtgtggactggaggctcaggagatgaagggcgagaggattgggtgcacgctgggactcagaggcttacattcttatgtgtggggagtacagaacccgccacaagctaactctatgttggccatgtttatggttatcagaagtggggttggcgttgaggacatcaaagcttcatgatgccaggggactgcaagagtcccctccgtgggcattgggcaacccaggagatggctaaggagactgaagccagctgctgggcactagtggtttgagtgaggaggaagagaccagagaggactggggcccaggggctgggacttagtggtggagggggctgtgaaggtctgtccagcttccatctgcctgttgtgcatgccttgcagggaggcatggcggcctgagctctctcctcacttggactttctgtggctgaggcagaaataaacagagatggacatcaatatgctggtgtgtgaaggcaccccatggggttagctccaggcagacctaggcattgtgtcctgccatctcctccctgcgccacatctcctgttcagctctatgcaagccacggccccacatgccctgtgagtctgccctctcccaccctgcctaaaccaggccactggtctattttacagaaagatagggttggacatagcatcaggggtcacttgaaagtcacagggctggaatgtcaggtggattcagggcctggggccaccattctgtgacagctgagctgtgggcacattgagctgtgggcaggtggagcagaaggagctcaatttcagaggaagagagagacagagacagaggtagagagagagagacaaagagagacagagacagagagacagggagagagagaaaggaagagaaagatggagagagacagagacagaggaagaaagagagagagagacaaagacagagagatagagaaacagggagagagagagagatagaaagagagtgacatttagagagacagagagagggagagagacctgatttccacatgcagactgaagcaggggcgggagcccactcccggagaggaaggggacatgcagggcaggctcgcggtccaggtcctgagatccagagaagtcccatcacgccccttctgatcaaactggtctgagtgggcttctggtccttacacggtgtaatctttaaaacagtaactgttattattatcacatgaaactgcagcacttccctttcattacctttgagggtcgtttattgaccaacagagagacccatgcttggggagcaacgtccaaggtgcccagcagaggcacagcagtgctgacagtcctgacaagtaacgtgggacacagaccacctggagatctcagcctggaggtgcctcagttgctcagggtgatgagattctattttaagttcccaggttgtcatttaaacctctctcttctgtcttgggatgggctaatggtgagatgaggtgatcgcagggcatgaggcaggggaggttgaggtaataacatcagaagtaaaagtaaaaaatcaaccaaccctctagcccagtgggcgtggctggcccaatgagctgtggggctcccacaataggagtataagcagcaggccctgccacctgggctgctttgccacagggcatttgctccagtgtactctgcctcccaactagcccgtctcattgtctcatttattgacttctcccacttgccttttcatgcatgtgacttgaagacccttggtctaagctgtgaatcctgaacacatgaggccttgtgatagatgcccctaaacatcacaggaaacaaagcagggacaccctcgccatgtaaattcagcttttctgattacaagacagaagggatttttctgactttcccctgtctccagaaattcatgcagaatcctgatttcatcacaactcaccagattttccttccaggccagcctgcctctggggcttaggttttagaccagagcgggtggaaatacagaggtggctccattgccaaggaagtcctgaaaggcttcctgtcctgcttcctttctcttgtgctgtggatggcctttctgtctaagcagatgtgtgtcacgagaaggggcaggtgtgtgtgatggccattcaggcactgctcatgcttccgagttaaaacctcctacttaatcactggctggaaataagcagtgaattctgcagggcgagccacaagggcagtgctaggaaagtcgctgtccttcctagaaccacagttgcttttgttagttttgtaaaggtgagtgtatacacctgtaccgaggcagaggtgggcatgtacacctgtacacagatagaggtgggcacatacacctgtacggacttagaggtgggcacatacacctgtatggggttagagatggacacgtatgcctgtacgggcttagaggtgggcacatacacctgtacggggttagaggtgggcacgtacgcctgtacagggttagaggtggacatgtatgcctgtacatggttagaggtgggcacatactcctgtatggggttagaggtgggcacgtacacctgtacggggttagaggtggacatatacgcctgtacatggttagaggtgggcacgtacgcctgtatgggcttagaggtgggcacgtacacccgtacggggttagaggtggacatgtacacctgtacataggctccaggctcttcctcctgcaacagtgagctgcctcgtttgggtcattggcctttctcacagtttgcaggggttgtgcagatacagctccttgctcagatgtcatttcaatttgtttcctgggaacaaagctctccaccatttaagatacatctcttttctctatgggaccctttgtccatattaggccaggtcctctcaaagctccttccagttaggcagttcaggaaatgacatgtgccttagatgacaattcaacagaacaattcaatgcctaagtttttaaaaaattattacttacttatgagccagagtttctttcttgttgcctaggctggagtgcaatggcatgatctcggctcactgcaactccgcctcctgggttcaagaggttctcctgcctcagcctcccaagtagctggaactacaggtgcccgtcaccacacacagctaatttttttattttattttattttattttattttattttattttattttattttgtatttttagtagagacagggtttcaccatgtcggccaggctggtcttgaactcctgaccttaaatgatcctcccaccttggcctcccaaagtgttgggattacaggtgtgaaccactgcgcccggcccaaagcctaagttttagtataagactgatgtgtcttcagatgctgcctctgccatttgcatgctgtgtgacttcagcctggcagctcaacctatctgagcctcagtttctgcagctgtaaaatggggaccagaactgtctctactccctagggttggagggagagccctcagtgtgacccccggtgtggagtagggagggtttcagcactgaggagttttctcagcattccctgtctcaagactgtgttaactactgaagatggggtcaattactgacccctggggacttaaaataatcagtgccgcttttcctcattgcctaatttattatactcaagaagtggcctccaaatgaggaaaacctgatccatggccaagctgccttgaaagttttctttcaattcttttggtaacagctgtattgagagataattcacatatcgtgcagctcacccattggcagtgtactgttcaatggttttgagtatgtgagcagtgttttgcaaccatcattgtggtgaaatttagaatattttcttctcctctaaagagaaccctgtgtccattaggaatcacttccattttcctttcccccggcccctggccacctgtaacccgctttctgtttctttagatttgcctattctggacacttcatagaaatggaatcacatgacatgtggcggttatgactggcttccttcatttggcatcatgttttcgaagctcatccgtgttgtagcatgtgtcagccctccattcctttttatgacagaatgatattccactgtctggatacatcacactttgtttccccattcatcaattgagggacgtttgtgttgtttctattaattgttttaacctaaattgcctttcacaacgttcttgttttgatgtaactgtctgcttatcaattgtagagttcattaattcatctctctatgtgcccagtgaatatttattgagtgcccagtaagtcttgggtgctgtgcaaggcattttgatgaatctgtgaactaggcaggtaagactcttgccatcacggaaggtcccattctagtgggggccatttaggtgctgctctttcttctgatctttagtggatgaccaacaacaaatagctattaatacacaccatgatgtcggtgatgacgaatgtggtgggaaatggagctgcctacagggaagaaggagtgatgggtgctgtttcagatgtgggcactgggaagatgtctctctgggcagggcaatgggtgcagagccatggatttcactggtctgggtcaagttcagaaatgggtggactatgatgaacctctgaagacctggagatggggccaccttttgaggcagaaacctctcttttgtcctgtgagaagtctgacttggcctcacagggtgcagtcgtcccctgccctggacaagctcatgtgaatggccagagtgtggacacacatccaccaacctgcattctcaattacgtggaagcctccatgttctctctgcatttgaccttctctggagggtaaatgaggacaggcatctgccgggggtggggggggggggcaggcacttttactgtttccatcctgcaaggtccggggagaccccaggcttttctgtcgttaaggtgtcctagagggagcattcaagcttatgtttgttggacctgtgacagcacgtggtgcttgtgtttacagcctgctccatgttccatcttctactgcacttggctatttacaggtccatagacccagatggtgctgtggtttctgtctccagaacgcctccccagtccggcacttattcccactctcactgccatctcctgggcgttgctcaccagcaccttaaatgttcttgccacttctcctctgcaatctcgtactttctgctcccagaccaagggctagaggcatgctttctgtgctcatgtgcgcatgctttctcagcaaccttgtgaggctgccccaccccctccacagctcctccctggtccaatgggagagagcatttggtttcagagagaaccatgtggttctccttctgtttattctgagcttttttttcttcatttagcatcaattcctgtcatggaaaatcacaggagccaactgaagggggatttccagaatatttggccttccttgggccttggtgaagtggcttccttggcctgggcaagtggggctgtgagcatctgtacattcacaagaaggctgggggtgcggctccatgctgggtgagcctcctctctccttgccggggaagggctagagtaagagtcggtttctccaaagtgatgatgcattctttctcttatgggtctggcttggaagccacagaattcaaaggcagtgctgggaggtggcttagccctcctctgctttagttggtggaaaggaaaggtagaaacctgaggtcaaaaacaggtggcccgtgggcctaggtcagcctgcagacttggttggtttgaacacagtgtttgtgtgtttcattgaaccaacatttaaatgtagggagatttcacaccaatatctggattttctttctggcttggcttgaaatactcagagctcgggtactgctggctattgccaggctagagggttcatgaggatggaattgtccagctgtgatattggctgtctccggggcctgcaccatgcctggtagatgaggtccatccacttaatgaaggaacggactggccatggctcttgccaggctgcgtggctgctgcctgctccaggcaggacctgccttctccagttaggccaagtccttgactacccacgtggagaatccacacctggttcacctcacctacttacctgtgtatccagcctggcctctctaggacatctgcatctggtccttgggagcaaccgtaggcatgaggaatgtgctgaaagggatcctcctttattctgaaatgtggcccatcaggcctcagctagagattcttccctaaggaagtctggagtcccgtggctgtaaccacagctttcagaagcggttctcaaatgtgggcagtttgggcaccgtctggaggcattttcagttgtcgcagctgggaggcatggtgccactggcatctcatgggcagaggccagggatactgctaagtacccccacagtgcccaggacggcccccgccacagagcatcatttagcttcaaatgtcagtattgctgaggctgcgcatccctgcgttggagtcacagtgccctgagtccctgtcccaatgctgcacttgcccttgaccttcctgcctcctcgaacctcagtttcccatctctaaagtggagtgatcctcacatgcacctctctcagctagatggagaggaaacgccatggcctgcatgtagaatcacactcagtggtcggggttgcagctctgatatttggggaggccctagccatgggggctaggatctgggctgtggaatccacctgtgtgactatgggtgggtcgtatgtcctcctgagcctcagtttcctcatctgggcatcaagagaggaatagggcagcctctaaggatgtgaggattaaatggtttaatgtctgcactcggcacatggaacctgataaacgtgcgtgagcagcgccatcctgactcagcggtgtggttctggggtctcctgagacaccactgtgtgcccgacacccagcttgcggcctccttccctccaccatctctctcctcatccacgagtcaggttaatcctcccccttgaccccacacaccgcagcaaagttttaggaagttgcctgtggttgccctttggtgtatggactccagggtggctcctgtggaggtgggaagagccttgggggcttccaggcaagagaggtgagtggggcttagcctaggctgtggtggtggggttggtgaagagggaaggaattggagagaggccctggacacagagcccagaggagttgcctgcaggttggatgtgtctgttacggtgagctgcaagcaatctgagggcaggagggtacctcatctccctcagcgtctctctagtgtgtgaggctgtgtagtttgtggatttgaatagacttggagcttttggggcatcttcctgggacaacctcaatttatttggcatcttctcagagtttatctgtgggcatggcaggagtgaccccagactgggttcagccctctcttcctggctgagcctctttgggtcttagtctgctcatctgtagaatgggaatagaatccttcactctgtggcctgttgttttaagttttcaataagacctggtattggaagcccccatcaaagtgaggagctcatgaagcacaggcgttgggcaccagatgcaggatctcttcctgatggccgagcaatgtggcgctaagcggggtgtctgcggttcgccccgcccaggtcagcagcacgacaaggggcaggccttggattctcttagacctgctcacagcctgggcttctggggccctgaatgtggccagtgctcaggtggttgggagctggcctggcagcacctggggctcccaaacacaagggaagacaggcagctgggatggtgaccctggggaccctgctatcctgtggaggccccaggattccgacttgtacccgggcttgcttggtgctgtcttgggactgtctctgggctgggacagtgagctcttggatgggccctcggctgtcagtgcctcagagctgcagaaggtcagagccaggcctggggtggaccaagtggtatctacacccctcccaaatgtgtccgaactgggtagttttgtgcagctcactctgcctctctgagccttggtttcctcacctgacctgcacagtggaagaggagaagagcctgacaggaaggccggatcaagctggtagggtttcagtgcaggccctggcagagcagccccgaagcttgggaaggccaggaaatcccgcgctggtctccagacctgcctgcccgaggagtcgagcttctgatgaaattcagctgagatttcggttttttgtgctctgtaccctgacaaggggcaggaatcgggagccagcctcggctgtcagtgtcctgggctggttccctcccacctcccgcttaaaggtgtcattagcaagggcaagacgtcttctaacaggtggaaacaacttgtcaagacagcctgtggctgctgcgtttagagacccagagaccctgaatgtggactaacgcccccagaatgttcagaattaatgtgctgccccaggcagtgctggggcggggggcatggctctgactcctgcccttgggtttgccccactctgccctcttccccttctcctgttccttccccttctcctgttcctccttctcctgttccttccccttctcctgtccccccttctcctgttccttccccttctcctgtcctctcttctcctgttcccccttgttctcgttccccttctcctgttcccccttctcctgtccccgcttcttctgtctccccttctgttccctccttctcctattccccgcttctcctgttccccccttctcctgtccccgcttctcctgttccccccttctcctgtccccgcttctcctgttcctctcccttctcctgttccccacttctcctcttcccaccttctcctgttcctgccttctcctgtccccccttctcctgttccccctcctcctgttccccccttctctggttccctccttctcctgttccccctccttctgtttccccccttctcctcttcccaccttctcctgtcccccacttctcctgtttctgccttctcctgccttctcctgttgccccttctcctgtcccccgcttctcctgtctctgccttctcctgccttctcctatccccccttctactgtccccccacttctcctgttcctcccccttctcctgttcctccccttctgttcccccctctcctgttcccccttctcctgttcctccccattctcctccctgttcctcccccttctcctccctgttcctccttttccccctctcttttcctccccttcctattcttttccctcttcccttccccctcctcccctccacttacccctctccctccctattcttttccctcttcccttccccctcctcccctccacttacccctctccctccctgtccttctccctcttcccagctaattgtattgaggctgtaccttgtgataggaactttgggtagctctcttagctcatatcacaccatccctggggaagggtaccccattgtacaggtgggtacacagaagaggggagagatgcccccactacaatgtgctgggagcagaatttggacctggatctgagtccagctcctccatcccctgcaggaaggatctgggctcttggggtgtcagggggcaactacctcttcatagcaaagcttcattcgttaagttcctggttctgggctattgtccctgtctccgaggatcagagaggtgaagtcccctgcctgggttcagatggttatggagtaggggtcctggttcagacccatggctgtctttcttgccagcagcacttctttctttggggtgatttttcccccaggggacactgcagtgcctggagacattctggttgttataactggggtggagggtgcttctggcctctggcatgtagctgtcagggatgcggctaaacctcctgcaatgcacagcacagcccccaccacagagaattgtgtggtcccaaatgtcaccagtgctgaggctgagaaaccctgcaccaggcccctccccagctgaccctatgttcctgcaactaagccagcagtagacatacctgcagcagcaggtgttggtgctacaggtgaccctaggtcctcgacctccccatctgtctgccacctgggcctgggcctgggcccggaataaaaggtgcaccaagggtccctggcttcagcattttttgttttcaggttgcatatcagactccttcttgcctcctgaggtcccttgggacttggctccaggcagcctccctgatctaagacttcagcagccgcctcaggactctgcatggccaaggtcccctctgccccaggtcaccaaggtcattgtggtagggaaggagaagagagggccctaagaaaaactccagtcccactagttcctggaacttgcctaaggccaggagaagttgctgccatcgtgggttctgtatatgggattcaggactttggttcaggtggtttctgccaggctctggccagatgccagcctaggcagtgtcctggcagtgctgagtgacacgtctcgggcacagagaggagtgggcgcctggccctgagcagaggggaggcttgttgggggccagcacttgatccactgagccggaccctcagaccctgggttgccctcctcacccccacccccacctcatctctgcttcctgcaacatctatatttaaaaatgttgacagataataatggtgttcagccccaaaatgcagacaggagcttcctgacaattgcagtgctgcgccgggttggaggttttctcagggagcggagcgagtccccaggagcaagtgagagtgccagggctgtgagggctctttgccaatcttgacctttcagggagatttgagagaaagactccagaagcccgcggggagagcaggggttctggggaagataaagcccttcatccaggatccctctgtgaccataaggtgagttgctttgccccacatctctggtgaggcagagggcagggactctgcttagggagcaggcttcttaaaggcaaagggtttgcaaattctagcagcagcagggccctaagagaatggctttttttttttgttcttgaatcggatgactgcatttggagtctggggtgaggggtgggggctgcccctcttggagccacagatgggtcatttttatgtatcaagggagtcagaccaggatcagccctgggtttctggcacagagtccagaaagagtcacgaaggtcttttgtttgcatgtgaatggtattttaacctattacttctgggctaaaaataaaaattcccctcagatgcctttttgtctgtagattgtaagatcgtttccaggaaataatagattgtcattgatgtgcgttttgactgcatggtgtcctattcttaagccaggttttataaaaattcaaagtagaggaggtttcccacagtggagattgaagccttcatttagtgtcaggaacatatgctccactatcaggagtcattgtccttccgggatctccaccactgaaccctgggtgggagtgtgggagtgggtgagggagaaggcacacttggcttttgtgtggttttacatttggtatcatttgtggacttttggttctgaaaaatggtttgcaagtgaagttggatgtctggagttggggcccaagaaggcgatggagaagtgaattctaattcacagttaatatgggtcatggttaagttcttggaagcaacattggtttccaaaggtgcctgctgcgtttttaagctgcaaggttttatgtttttttgacccagtggaaaatggcgattcaggatcccaaggacttcaggagaggttgtctgaatgctaaaaccccttccctgaaatgcttgctttctttttagaggacaggaaatatgggaaattaacagtccttttgtggagtgtggtttgcgtgttgttctttgaggaggaattacggaattatgtgcgtgtataatgatggtaaccacatacacaatcgaagaataacaagtcagaaaaatccatggtgaggttcattcagaaataatcaagagtgtattgtttaattaaggagaggatcagaggaatgcagtcccagagccaccatttcggttgtcacctaggtgcaactctcagcagaaggaagcattcccaataagatgttctgaaaacgtactgccgttgaatctcacaactttcaccccacaagctgcaataagaggccagtatgaaaatgcgctctttcttccccatacattttcttctgttcctgagccgagcccataggtagcttggcagtttgcaattctctgtctacacggaatagatatagatttttttttcctgtatgttttgggtattaactctttggttgccaagctgttgagccctgagtctatattatacaccttcagcccgtggcttacagggcttcaacacatcgttgttatataatgcagtagttttgcttgtggggtgactgttcatatcgtggatgctcagaaaattctatttttaaagtataaaataccactcttcagagcagcctgctcactcctgcctccctgggagccacacgctttgcaccgtggagttgttggcatgaaggcacatgacatatggatgggagtgcgttcctcctgtctagggcctcttaggacccgaggaatggctggaggcagtttctctccagtcctgaggttgatgatccgaagctcttggtgctgagcctgtgctgctatttttagcttcctttcttccctgcatcttgacataattcgacatgtcgcagctgaatctcatctacttgcagagcttaccgtgttttgtaatctgtgttttgtggggcagaaatagtccttgccagagcatattatatcattattattcagggggaaagttatgatactatcaattaactttagaagatgcaaaacacaattgatcctttgattttctttctactgctaatttcctggctgggagcacctggagggtaggcactcctcctccttctgccggaccagaaggcagcaagcagtggttctcacatcttgggaacctgtatcagaagcacctggaggggctgttacaaaggcaattgcagccccactggcagagtttctgagttagcaggtctgggtggggtgggggggcaagtaatttgcatctctcacaagttcccaggtgatgctgacgccggtccagcactgcactttgaatcacagatggagatcacggcagagggttggtaaatatttagggggtggacgatgcctacatgcagagagccaatttaagaaatatacagatggtggagcaggagattttcagttgttgtgtatcctgtccacgcggttgaagatggacttgattgaaaaagaaattaaagttgaaataaaattagctgactgagaggatggctcctgacagtgtccaatgctgtgatgttatttagggaggatgaagcatcacgactcagacaacttactttgagatggccaacagcacacacagacataaatgaagtgcgtgtacatgcacacacacgaaactcagcaaaatattaactgctgaaacaataggtgttcatattattctaatttcatactatttctatttctaatacttttcttcataacaaacattgtattaacatggcaaacacaataatagggcttaggacagcttttcttgtgtgtgtgcttaatagtaaatcaaggtcacccacatgttcacagctgtgttgctctgggtggcatgggcatcggtactgtattagtccatttttacactgctgataaagacgtacccaagactgggtaatttataaagaaaaagaggcttaatggactcacattaagcctctggggagccctcacaataatggcagaaggtgaaaggcatgtcttacgtggcagcagacaagagataatgaggaccaagtgaaaggggtttccccttataaaaccgtcagatctcatgagacttattcactaccacaagaacagtatgggggagactgcccccatgattcagttacctcctgctgggtccctcccgcaacacgtggaaactataggagctacaattcaagaagagatttgggtggggacacagccaaactgtatcaggcacacgcatcgctttagggagttctcatttccttccattcaacctgatcctttatctgcttgttctttcctcctttcccttccattctctttcactccctcctccctggcttccctctcttctgctctccctccctccttccttcttcctgtccccatctcctgtcttctggtgactctgggtcaaaggaccctggtccagaagggttccgtgtggggatgtgttgtgctgaacccctgttaacctcagtagggaaggtaccaggttcaagaggccaaagaagagacctggagccagcaaacaagacatacagttttattatggacttacatgcagggaagagagtccagtggtggcaggttgaagagaactgtcttaacatacagaaacggtccagtggtggcaggctggacaggagaactgccttaatgttcagaaacggtccagtggtggcaggctggacaacatatccaccttcctacagtctggtggtggcagactgggcaagaaaaccacaactgcaaccgcctgcgaacatcatgcagtttacgcagcattttcatttagcaccctcctcctaacagccctcacctggcaaccttcatgtaacccaagcttgtccaacccaaggcctgtgggacgcatgcagcccaggatggctttgaatgcggcgcaacacaaatttgtaaactttcttaaagtgttatgagatttttttttttagctcatcaactatcattagtgttagcgtattttatgtatggcccaagacaattcttctttttctaatgtggcccaaggaagccaaaagattggacacccctgatagtaacccaaaactcagggcctcaatcccctgtacagcccgtgttccacaggacaggccggaggctcagatgttgtggtagataggaacagatctctgggtgggccactcccggattccctagtttggaacacacattcaggtgcacctgtcatacagggtcattctaagggtatgcttaaaatattgatgtcaggtgtgtttaccctgcaggatgctgtggcatctgcccaggaaaaagttgaattatgccagttattgttttcccagggttttcaggctgcctccttgttttttaaataaagttttattagaacacactcacacccatttacttacacacttctctggctgctttccagcagcatagctgaggcagagaccatagatccacacaactgaaaatatttacttctggcctgttgcagaaaaaatttgcccatgctgatttgtttctgtgggctggctgtcttggagattccacacgtacacacatgtgcacatgtgcatacatactcatactaaggacatgcagcaagacgttaagggttgtggagtctagagtacatgtgattgttcattgtaccattttttttttctactttttcacgtgtccaaaaaatttgtaaaacattttgatgactgtggcagtgaccaccccagggtctctagaggaatgccacaggggtccatcccaggttctgagtcttcaacatttgcctcacccacttggcaggttaatcaaatgggtagatgacacaaatcaataaaagcattaacaaagtgtcccatatattcaagagccaaacagatatctcaacagactgttagggaggctgagtcaacaaggagaagtttaatgttcataagcttcaggtatccagctcagatttacaaagatctttgcccaggtcctgcaaggagcagactttgataggaatcaggcctctgggccaggcatggcggctcacccctgtaatctcagctctttgggaggccgaggtgggtggatcacctgaggtcgggagtttgagaccagcctgaccaacatggtgaaaccctgtctctactaaaaacacaaaattagctgggagtggtggcacatgcctttaatcccagctactcaggaggctgaggcaggagaatcatttgaacccagggggtggaggttgcggtgagcagagatcgtgccattgcaccccagactgggcaacaagagcgaaactctatctcaaaaaaaaaaaaagaaagaaagaaagaaaaaaataatcaggcctcttggctggacgcggtggctcatgcctgtaatcccagcattttgggaggccgaggcaggtggatcacttgaggccaggagttcgaggccagcctggccaacatggcaaaaccccgtctctactaaaaatacaaaaattagctgggtgtggtggcgtgcacctgtagtcccagctactcggcaggctgaggcaggagaatcgctccaacccaggaggcagaggttgcagtgagccaagatcatggtgctgcactccagcctgggcaacagagtgagactctgtctcaaaaacaaaaacaaacaaaacaaaaaaaagggaaagaaatctggcctcttaatggaaccaaagtctgcggggtccctagagtgtgtgcaaactgttccagtcactgggacatcagtgtgcaaagcctcctggagcttgtgtgctagtgggagaggacaatgaacggcacctataaccagtaggggatcgtcctgcatgttagtaataagtgttgtgggaaatgaacaggagaagtagggggaggtaagagaaggtataaatgtggtaggctgtagacatttgagtattacatggagtgtcaggattggcatcattacggaggtgacatttgagcaaagccgtgaaggcggtgaggaagtgagccatgtggatatctgaggcaagagcctttggggcaaagggaaccttcagtgaagacgccccgaataagagccggcctggtgggttccaggaacagggaggaggagcccgtggtggctggagtcacatgagattgctggggagggagacgggagagaagcagggacattgtagggaggggcctctgccagcacttgggcttttgctctgagtgtgacgggtcgggggggacattggagggtttgagatttaattatgattcatcaaataacttgagaacaggctagtgtccaggtggactgaccagcctagcagtcattgctgcaatccaggcgggagatgatgctaactggccacagtgaggttgtggacgtggacacttctagaaggtagaatgatgcagttggctgagggagcagatggggaaacagggacagtggagtttcaagggaggactctcaggttctgtcgtgagtaacagaaggatagagcgttggtcctggcctatgaggggaaggccgtggtggagcaggtttcagggagagagcagttcaattttggctacagtgaatttggagcatctatttgacatccgtgcaaagatgacaaattggcaattggctgcacaactctgtgcttgggagagaggtttgggctgaagctgtgcattcgggaggccgcagctgagcagaagctgaatgtgagctaacgcgctctctccctgacttagtcatttgtctgccacctgtagtctaatttgccaaatactttcttttaaaccaggtcttttttttttttttcaaatttaaactcattttaaaaggatatctatgttgcacttttaagtagaaatccaatattgcttgcctttgataaaaggtaaccataaaataaaacaatgacaacaaaacaacatttagttcaagttaggcatagtctctcactaaggattttgagccagagggtcttatgtattatccaaacacagagatcaacaagtgtcagatgccagggtcgtcataataccaaactaagactctcctcttgaagttcttggaagattggagggaaattggcaagaaattagcttctgttgctttgtcctgggtccacgaatcccttaaagtccccttttaccctgttatgtgcctggcccttggggagatgctgagctgagcagccgttatagtgggtagaagaaggaagcttggggtccagcttgaccctctgctagaggttgggtttgccttaggactatgtattttctgaaaggcaaactgcaatttgcaagaacgcagagaggggcaatggctgtttattctagaacagacttgggggatgagaaccttggaaagaaagggtgggatttttcctgcatggttctaggatgtggccctgcagccagctgggaaggataaaaggatacaagtgggttggtttcacttccctctgggcacaggctttctctctgagaattctcactggggctcatatcttttaaattaagtagtctgctcctgaataatatctttctttggggctgtttctttttcagtttatatattggggtccctttttgacattataggctttcctcaaatgcctggtgagccaggatcgaccttgttcattgcagaatgaagcagcaaagagctggtgtgtgctcacggtgtgtttcagctggtgggttttgtttcaggttgcccaggcctggaggtggccttggtgctgaggggcctttgcagaaccttctctttgtggctggtctggagacaggcaaggatgctcctgtactttttgcctggagatgggagttgtccatgttatctgcaatccaccctaggctgatggtgagggagggagtctgctgtcataggaagcatgtaaacagactcaggcttctctcagcatgagaagggattttggatctctgaggtccttcctactgtggatttgcagtttccctccacaacctcacccgcaggaatccggaagcgcctgatgccttccctgggctgggagcccctagagaggaggatctgctgagctgttatgacatcgtgcccacaactgtgcaggcatttgggagatgctctgaaaatgcccgatgaagggttgtgaggatgaaagaatctgctgctgaacacaaactgctgggctccaggctactgagcccaacttattccatggcccagcatgtcccacggctcagcatgtcctgtggctcagcacgtcccttggcttcccatggctcagcacgtcccgtggctcagctctcactcctttgcttctgcaggtcccttggtctggcgtgtcctccccactcttcctgagttctctgaattctacttgtggctccagggccccctctttcatgaaaccttgactcaccacctccacctctttccccacctcacccaccactgtcctgctcttggggccctgcacccacctcctgctgggcccctgcttctgccctgcagtgctgtggcccccttcctgcccagcagctgggaaggcatcctgaagtgcatatcagatcttgccctgtccctgcctcccattgcctctggaccacagcctctgagatcctgcctgccttcctcatcttgtcttccattcctggggaacagtggccacatagccaggtggctggcagcacggacttgggagaccctaccagcctgggtttgaaccctgtctctaccgcctgcttgctttgtgacctggttcctcattttcctcatctgtaagatggtggtgttgaaaggacccgtctggtagggttgttctgaaggttgagatattcaaatgctgagaacaccacccagcacaaggctggtgaatgctccaggagggttcactgcgccgttgccattttcctgttgatcctggagttccggccactctggcctctgctcacatagctggaactcgtcagaccatctcccacctcaaggtctttgcctctaccgtgctgtctcaggacactcgtcccctgccttaccattcggtcagcccattatccttcgggcctcaggttgaatgtcacttgctgagagcagccctctctgaccatccttttagagtggcttccccgcctcacattccccgttacagtctggcctgattgtatctgccagtgggttctgcttcccccaaccacaacttgcccatcatgagggggcagccttgcctgttgtcccctgcactgcatcaacactgcctggaccagaggccctcggtaactgccagttggctgaatgaatgcaggaatgaggcatgaacaatgcaaagatgctgaaccatgacatgagggactgtttcattcatgtggcatgggggtgggctaccccccccatacctaacttttccaatgtgacggttttccttctgaatttataaggtgcccaccttaaagacaggaattcagctcatatcttttaatagaccctgcaaggtatccagttcctaggacacagcattttgttggttattgaatgagactgaagggatgagaagagtggccaatagcatggagctggggcctaactgcccacgtgtggtcttggtccctagtatttattagccaagtgtccttggccaacttcattttatgccacaaaacctcagtctcctcatctatacaatgggaataataataataccttttctagagttggagggaggattaaatgagtcagttatgtttaaagtcctggaacagtgccaatgcccaccacatagtaatttccatgtaaatgtgagctgccatgatgatggtgatgatcatggttgtgatgatggtggtgatgattgtgatgttgatggtgatgatgatggtcgtgatgatgatggtgatgatgatggtcgtgatgattgtgatgatgatggtgatgatgatggtggtgatgatgatggttgtgatgattgtgatgatggtggtgatgatgatggtggtgatgatgatggtgatgatgatggtgatgatgatgattgtgatgatggtggtgatggtggtggttatgatgatggtggtgatgatggtgatgatgatggtgatgatgatggtgatgatgatggtgatgatgatggtggtgatgattgtgatgatgatggtgatggtggtggtgatgatgatggtgatgatggtgatgatgatggtggtgattgtgatgatggtggtgattgtgatgatggtggtggttgtgatggtgatgattgtgatgatggtggtgatgatggtggtgattgtgatgatgatggtgattgtgatgatggtgatgattgtgatgatggtggtgattgtgatgatggtggtgatgatgatggtggtgatgatgatggtggtgattgtgatgatggtggtgatgatgatcatggtgattgtgatgatggtggtgatagtggtggtgacggtgataatgatcatggtggtgacagtgatgatgacgatggtgattgtgatggtggtggtgatagtggtgatgacgatgatgatcatggcagtgatggtgatgatgacgatggtgattgtgatggtggtggtgatagtggtgatgatggtgatgatgatcatagtggtgttggtgatgataatggtggtggtgaatgtgacggtgtgatggtggtaatgagggtgatgttgttaccttgtagtagatttgaaaaagtggaatagagtggaattaaagaaaacactactgagttaataagaagaaaggtagggcgcaggaagtgtttgctaggaaatggaagagtccagcttattccagtatcagttgaatgcagcagactcatgaactttactgaaaccaaaatttaccgaagctgatgagaggatcatgatttcccagagtgtggactgaagcctccgggaggtgtcagagatgattttggagtagtgcttttcacaccctctgtaaaataggacccatttaaaaattttcaatctgttgcaaactgataatttcattaatgtgtagagaaacattttcacacttcacccctaagagaaggtttgtggactggtacctggaacagatacttatcttgtagctgccaccaagaaacactttccagatgggcaccgtagcaggacactgtgctaggacacgctttgagtagtgctgtttcagatgaaaatcacatcacatggggctttgaatttcacagaatcctgtggtcagctggttgctcccctgtgaattatctttcagttgtgtggttgtatatggaggagaaagttgtagtttgtggctcatgtgtcactgactggtgatgttggatgatttctcttttctaacaagcagagagcagcctcaggcacagaacccttgacgggcatggggtcttgccagaatggaattacactgacttgtttccattgcatttattttgtggccacttaatatttttggatattgattctgattttcctattagagccaagatgtaaagtttctttaatagataatttaggtgcaaaaagtgagttgccttaaaacatagtgtacattatcatgcagctacgagtgaatatatgacaaaaatcatgaaagtggtacaagacaaatttgcagagaactctagtggaaggcaggatagaggagtgagaatagaccaaatggatgtttggggtcatttgggggccatgtaagcctctcccccttatccctggtggaacagcattaaggacatcctctccttcatcccaaacatctgctttatgggaaaccacaggactatattgttagtagtactgggaaagcctagtcggctttatcttttggattctgagaatgttgtcagtgatcatgtttctctcttcactggagttgctaggagttccagcatccaatttcagctccaacctccaatccttgcacagaaccctacagtacgtgttttgtgtattgaagccacagaagcatgtatttttcctcctcattctctccctgacctttttttgattttgttttttgtttttttttcttaactgcagttacatttttgtaagctgtgttacatcgttgtttggaacacagtgggggtaatgcataaatgctgaataaataaataatgatgaaactttttcctcaaactgtgagattggggccactccattgttagagttattttaatgtgatcaggacaaagaggccaagagtgttgtaggaagtaagctttgttctcgtgggcttgggctgggcaacgctgtggttgttgggaacgctaatttctgttatttggtggtgctcatatctcaggcctctgtttaagaaacaacatagattcctccaaggcacatatttgcatcctgtgtgggccgaggtgcctggcttcattctttctctagatacccacactatctcatgggtatttttaaatgcgtgtcttaagagccaacttctctgctgtgtgcaggcttttcatgatgccgggagagttgccacgtggatttgcaggcgctgagggcagaaacaaggaacaggcagcatcagctcaatgggtgggacccactgtcctttcagcccttggtggggcggccttggaggaagggtcattctccaagcagggcagaactcagttccaggttggccagaaggccaaatggactgtggggcaggtctgaggccaggtagtggggcgacccagaagcaggaagatggtgtgtcaaatgtagagtgagacagaaatggcaggggctgaggagttgttgagtcctgttttttcacacttgtgtggggatcttgaggagtttcgtagaggtgccgcagggtctgcctgttgaggagcaaaccaagctgaccgggttacaggtgccatccactgtcccctcccatctgattggtttggatactaggatgttgtgtggattctcctggagtccagacatagccagtgaaacaatattgaaccccctgcaatagtccagccccatcattccatttcataaaggaaactgaggccttgccagggatcccaaagtggtaatccctcttgtagagttccaggggagggcaccaacctctacctagctactgaagccagaaacctgggcattcacctgccctttccattttcctcctcatccccatccctgccacatccctgtatcctggcatctccagccttcagcacctctccaattcatctgcttctcattacccccagccacaccaggaaggtccaggcccccttgtctgtgcgctgggaggatacagatgcatcctgagccttccagcttcctctgttgggcccatctaattgggtttctgctgggcgatgggagtgatcatttgaaacttcaaatctcattatgacagtctatatcccttcctcaatgttcccatcttgtttcacatctttcagtggttgctcatggcttgtaaaatcaaaacaaaacaaaacaaaacacccaaattcctcaccaagccccctcctgcacctctggcctcatgatggcatgattctttgagtctggggacctgagcagatggtctgagctgtgctagaactctaacccacaccaccgcctaccatgcacaaacacagatgtttgctggctgactccagctcatcctctcatcttagcctcagcatcacttctgcaggaaggccccttccaatctcaccagggcccatcacgtcatcctgtctgatgccctttggcactctgggctaatcctttggggccctcagacgccgtccccactgtcttagttgtctggtttgctctctctcttcccctactggattgtcaacttcctgagagccaaggtcacatatagctttagcctgtgtcccaggccttcagcatggtgcttctttgggcacaggaggtgtgtgcagagtggaaggagaccttcatttggtggggagactgtattatagagaagtagtttcatgttccaaagaacaagcaggaaatatcttccttctcctcctctttctgctagtaaatcctccttcctcctcactggctggatgaagcatctcatggtggaatagtttcagatccagggttcccaggaaagggaaccacctccagttccccatcccctttcctttcctgggaggtctctggtgcttatgctactaataatgaacatttaactaatgagttgctacctgttcatattaccaaagcctccctgccaaaggccaccagagacattcctggggtcaaatcagattagatttatggagcttcctgcatcacagggtaacacagtattgagggccatgacaacatcccaatatacaggactgggagaggcttttttacagggcttgagtatgatctggatgattctagaagaaatgaaagaagcaagggccagctctatctgatactatcaagaaagaggcctcccactataggatatctcagtggtctttgttcaggaggttggaggaactagttgaggctgggtaagtgcaggatccctgcccgtggaggggacatcagtcacgtttgtagcttccatgtggcctcgggtgtcctggcggagaccttggctctcctgtcagaagcttcctctgattgtcaacagggatgattttattttactctttatgctttcatctttcatatttaaaactttgatcagtctagaatttcttttgatataaaatgtgagggacagagccaacctacttttctattttagattgccatcaattgtcccaactccatttattgaatgataatcgcttttctctgattttcttgcctcctttataaatatattagattctatacaattttgtgtctatttttggacttttcattttgtcccattgaattgtgtctatccttgcaacaaagccacattgttttaattattatcactatattatatgttttaataacagaagtccctttccctcataccttattcctcttgcagctttttctagttcttcttgtttattttttatataaattttatcttatttgctatatgtcttttaaatatctgataactttagcaggattttagttgtgtaagaattacagaattttaatcctggaaggatgctgaggaggtttctaactctctcattttctggagaggatatgattttatcaaagtgatgctgtgagtttatggcagtgagaaaccagggaatccccaaccctgaacccacctccagatccactcgccccaccaagcctccagcttttgaccctgcatatttttaggtacccagaaattacttaatatttagcttagtggactgccacgatttaaatttgaccttttaaatccaagcacctccttctgctatgttgcttttagaagaaaggacaaagctgaggaattcaacctttgtttccatttatctcttagccttccgagacaggacgcaatgtagccaacaccactcctttgtctccatggtcaaagtcggaaggaagttctttcagaggggttggcttcattgatcttgtggggaaaatcttacaagtacccagggcatggtgtttgataaggaagtgagtggtgtgaaatccaggctcaagaacaaaagccctacaagcctgtacccaacggggccactggcctagaatggtaataaatagaattgggtgacaaccttgaaggtcacccgtggttcagctctggaggtgtccttgtttgtactcactttgagtaaccatcaacttataaatagcctcaggccaattgcccagtgatgattttgactgtcgcttgccaggggcctgggcttgtggtttggttgtgagtctgtcatggtctctgtgacctcagaggaggaggaaggaagatgatgatggatgcttctagtgatgcaagcaacaaacatttttggacaatgtgcccaataccattctctgtactctgcatgagttaacccttcaggcttcaaacaacgctttgaggtaggtgaggagactgagcactaaaaaggtgaatgcggagccagtgtgagcacaaaaggcctggttccctgctagaccgtgcctcctcttggctggagctctatggaaagagttggaaccagggagccttggttaaaatatcagctccatcccttatgaccttgggcaacttacaaatctccaaatctgtattttcaccttttaactagaataatgtatgtcaattatagggtgttaggattaaatgagaaaatgtacataaaacttttggggcattgtctggcactgggtaagtactcaatgaaaaaaggtaatggttttttaacttgtttaatgtttctaagccttaggttttccacttataaaatgaaagcgtcattatatatggtgcgtggctgtcttctcttttggtttggttcggtttgaggatttgtcggggtcacattaccgtcatgaccacctgtgtgaccttgagcagattccttaacccctttatgttgcagttgcctccactctgaagtgggggtcctgatagtggctggctcagggttgtgtgataatcaaatgagagatgcttagagaataagcatcggcgtctggcacagacgtcctcatcctccaagatcctgtgacttgttgcatctatgtgcttgacttagcccacaatccgtccccatctcccttctcttctctttgttctgggaatctttaaaaacacttgttgagcttggggtcggtttgcagaatcatcacctacttttagggtagtctgtttcatttggggtaaacatttaggtttctaagacattgggacagtgatgtttgacttcacatctattcatgtgctctcactgagctctgaatatgatgtttccattcccccatctatcagagatgacacagaatcatttatatagactcaatagactcttaggggaggcaccagccctgtctgtagcttcactacttctgagactgaggtggtacctggtgtatcagttacctgtttctggcaacaaattattccagaatttagcttgtgattttgttgacaattaggctggacttagctgggtggttcttccaatcttggctgggcccctgcatgcatccgtattcaactgcaggctgggtataacactgtcagattttggtgtcagctgggataactgggatgactcaaccctcttctgtactcttcatcttggtcctgttcacatggtggaggcagagccccaggcaagagggaaatgtacaaagccccgttagtcctaggctcaaatcgggcccaccatctcttctgcaggcaattggcaacgtaagccccagtccagcccagattcaaaggaagggggcacacatcttctcttgatgggaagaacagagttcactgcagaggggcctagtctggggagatgaagaaatgtggccgtttttgcaatttgcctcactgaccacatagagggtgactggccctgtattttatgtcatatgtgactctatagaaatgtgtctcctagctgggctttgcagagatgcagactctatctgtctttctgttgtgggctttctaccttgtcatgaaaaggccagaaaattcctgaaatgagtgtccttttcagtccttcaggtgagaggctcctcagggatccacagaccattgttttggcttctgtctccctctgcttgtcacacagggatcacatacacaggtggaagtgaacttgtttgcttcccttcccaaactgtaagctctgtgaagacaggaatctccttgactcactattatatcattggcacctagtaggtcactgtaagtataaaatgaaagagggcaggaaggcaggaagggagtgaatgagttaggaagttaggcatctagataggaaggaaatgagagaaagcctcgatggaagaaggaaagaaagacactggaggtaaacagttgggaaagaaggaggtgaagagatataaggaatttaaattattcttcaacaagctaggtatggggcaaggcactggcctttctgaacctcattgactgcatctgtgtgatggagtaatagtagcacctacctggcttataatgaaataatacatagaagcttttagaatagggaccatcactgatggctgctctagttgttctagtttcagctgatgaaggcactaggatcctcagcatggaagacacagcagcagggacagggggaaatgctgtgggtccaaggagatagtgcaggtgctcagagggtcatggagagagagaagcagcccaatgattgccgggtgctatgccattcagtgcttcttctaggcatggctttgagcagcaattggccaggcttccagaaacttcagaacaagtggactgtgaactctctgcaaactagatgctgtgatatgcattttcataattcccccaaggatgtggacaggtggaaataaactcccagtcacacaaaaccccaccacccagagagcaatctggttgacatcctggctgagtttattaccataatttttcctacgggtacctgtgtaaatatagaaactgtagacaaaattggaattgtaccactgatatggtttggatttctgtccccatccaaatctcatgtcgaattgtaatccgtagtgttggaagaggggcctggtgggaggtgattggattctaggggtggatttccccttgctgttctcatgatagtgagtgtgttcttatgagatctgggtagcacctcctgcttcattctcttcctccttctccggctatgtcttgtgagatgtacctgcttcccctttgccttccgccgtgattataagtttcctgaggtctctacagtcgtgcttcctgtacagcctgtggaactgtgagtcaactaaaccttttttctttataaattacccagtctcaggtagttctttatagcaatccaagaatggactaatacaaccacttctgctgtatcttgggtttttaaaattcacattattttgtgagtattttctcactgcctgagaattttggggtcaggcatttttctcttcaccgcttagacactcaatttctgtttagaaaatggggagagtaagagtatctctctcctagaagttgtctattttttttttttatttgagatggagtctcactctgttgcccaggctggagtgcagaggcataatatcagctaactgcaatgtccacctctcgggttcaagcaattctcctgcctcagtctcctgagtagctgggactacaggctcacctcaccacatccagctaatttctgtatgtttactagatccagggtttctccatgttggccaggctggtctcaaactcctgacctcaagtgatccacccacctctgcctcccaaagtgctgggattacaaatgtgagccaccgcacccagactattttgttttgacctggggagagttaaatgagttaatatccttagcccagttccataacatccactgtaagcttttctatatgttcctttatttaggaagagtgaacatagtgccaagttttacttagagagcagtgctctgcatgctttggtgctagcacacaataaaattaaacggaggtcaaagcagagagcacttagggattcccaaagcgtccagaacaacagtagatggttataaaggacagcaatagtacaatgacgctgcctccaagacgaagtacagcattaattagtactgggcagtggatggccaggctctttcagggctttactgagagcctctgaagggtggcagtgatgaagagtggggccatgagtgaccatctcaggcccgtcgggaagatacttttcatgtggttgacccatggcagaaggaaggacctgtgtcatccctgagtgtctgagcatgttggggctgtgcttcgggacatggggtttttctccctggtctcgttgggatgctcttcacacctaagcagggtttgcacattcaaacatgggccgtttgtattccagccagcattgctgagaaggccggggagcagcttggtgcatactaaggagcagctcctgccctggctctgtccacaccaggctctctgggcagctgcccatggagaacacaagccagcaacctttgaggagagccaggccagcatttgaccatttgaggctgatggaccctgggtggcagggcctcggctctgcttttgggagaccttgaaggctgatgcatttcctccccagccccactcttactttacctggattgctgctgggactttgagacagtccacgctttcctattgtggaggctgtgccttgcctgggggatggagactgaatctattggtgatgatccagtaaagggtctcagagttcagcagagggtgctgggattcaccccaaatatttgggcagagggagagagacaggctgtgaaacagaatgaaataatgatgtgataggaagccctgcaagcattggcccctttaattctccctaggactctatgaggtaaggactgccccacttaccaggatatgaaacaaaggctcagaaggctcagaaggtggaaataaatctcccgggtttgaccaggagcccagcagcccttccccagagcctgttgacaaacagtgcaggcatgtgcctgtctcagggttatcttccgcctgctttcttctcagcatgcgattgcatcatattgtattgattgctactggaagactgaattcagaggcctcacagatctatatcatgactttacggaaatagaaaaagaaaaggtatttttcatggtggctcagacttacttcttatccccatccttgcaggcagaggcccctaacaaatgtcaaaggatgactgagggggctttggaagccaggagacttggctgtagatctcctctaccacttcttagccatgagaccattggtaactcatcgaaccttcctgaacctcaaatagctgctattgctatttgttacccatgagaccaaggaaatagtcttcatcatgaccaaggaatagtcatgttctagacagtgcacaagctaagaaaggagcagagattagaaggagaaaagaggaaaaaagaacaagcaggacatttttcacctaagagattgacaaaaaaatttaatttaatcaataaattacccagtcttgggtagttctttatggcaatccaagaatgaactaatgcaacaacttatgctgcatcctgtgttttattaactcacattattttgtgagcattttctcattgacaatatcaagtgttggcaaacacatgtggaaacagctcttacaagtctcagatataaattggtatggccatcttgcagacacagtttggcaatatcaagtaaaattggaaaaacaaatgctttgactgtccgtgactatttctaggtaaggaggcttggaccaggatgttcatcacaatatcaacattgtgtgtaattatgaaaaactgggaaaaaatcctaaatgaccattaacaggggactgaatacatcaaatgtggcatattcttacaatgggacacttggcaatagttaaaagtaatgaactaaatttctatgggaggaaaatgaagtggacagtataataccatgtttgtaaacctacccaccccaacaaaataatatcatatatagcatgtcaatgtgaaatgaaaaaaagactggatggagagagaggggcagggagatggagagacaaagacagagacagcaagcaagagaatgtgagagctgtaggtatcagactaaaaagacacataccaaatctctgataattgttccttctgggagtgttgaatgataaaaaaaaaaggatttcacctttatcaggaatgcttcattatatattataatagttatacatataaacacacaccagatgatagcttcaataccctccagttttgtgcatttgatatatgattccttgtgcttttaggttttcttaatgttactcaaagaaattggagaaataatttttaaaacaagagatttatttgaggagcttagagaaggggaaaagtttggatatctaatgatttttattttaaggtcaaggtatgatttgactttgctctgtaaagcaattttcttttctccgggagaatgtttgcagcaaacatttattaattagctaccatgttcatggcccacagaactctccatggtactagttctctaccaggcacacaaataaatcctcagctaagtaagtttatcttggatgactttttctctcagtttgataagaattcagcttgccatcctctggcctagctgagccacaggatgttgaaagaagatcaatgctgcctggtaagtacattcagaaacacaacttcccccagatattccagtgtttctgctgatgcccaaatccctaggtcatgtcagctatgaaaacatcagcaaatgtatggagtattaactggaaaggagtgttgttgcttcttactttttataagcccagaagattccaagaacagggaaaatatctaaaaccaagtcagaaaaggacgtaagtgcagagcccattggtgactgccgttatctgctttgaaaccccaggagttggcgatgttgtttgcaaggagacagctatgcttcctttcttgttttagtcttgggctgagacaaatatgacatttcctagatttggggcccagagctacagaaaacatggccccaaaccaaaaacttcaaattttaagtcattcatccttgaggaatatgctgatacctcatttaccccttgtgactcctaaaccctggacatacctttttatgctattaaaagaaggcttctagttttgtttactccagtctcctagatgttgtcattccccttgaatctcctgagaggctggagattatatttggtctggcaaatggttttctttctaccccctttctccttacatttattgtaaaaatattttaatagacaatacatgtatatggttacaaaattaagcagcatgaaaaggtgcacactgccatcatgaatactcttatcatcatcatcacctttattggatagtgaaaagtctgtggccgggcgcggtggctcacacctgtaatccaagcactttgggaggccgaggtgggtggatcatgaggtcaagagatcgagaccagcctggccaacatggtgaaaccccatctctactaaaaacacaaaaattagctggccatggtggcaggcacctgtaatcccagctactcaggaggctgaggcagaataatcatttgaacctgggaggtggaagttgcagtgagccaagatcgcgccactgcactccagcctggcaacagagcaaaactccgtcaaggaaaagaagatgagagaagagaagggaaaagttaagtttgcatactaaacttgctttctggttgaccagttctccttccctgaggcaaccactgttacaagtttctttttcatgatttcttgtggatttattcgtgttattcacgatatgtgtgtttgtcacatgaatgatggcaatctacacatactgttttgtaccttttcttactttgtaatatttcttggagatcatttcatggagatggatgttggtctttctcagttttttatgtgttgcctgataatctgtggaaaaggttcttctccactgccctgttggttgacactggggttgtttccaaacattcatcgatgaatcagtgctacctcgaataatcttttaaccatgtatgcatctttattttcaggtttgagtttatttgtaacatatgttctgatgactgcaactgcaagaccaaattatatgtgcattttaagtttgtctagatgtaaaacattggcctgcaaagatattatatcaacttataaaaagaaaaattaatggcagcactgtttgtcaatgccctcaccaaactaggtcattgacaattctaaaagatgggtctacaagggtagtgcttaaaaacatcatttttggtttaggttcaagccatgtttacacttgaaatggtatgatatcttacatggtatgagagtgagcaggtgggggcatatctggaaagagatcagtgtgctttggtagttgttgaagtgaagctgagtgatgagtgcatggtagttcacgtttccatgctctgtacttttgtaggtgcttactttttttgttttgtttttttgtttttgttttgagacaggggcttgctccatcatctaggcaggagtgcactggcacaattatggctctttgcagcctcgacctcctgggctcaagggatcctcccgcctcagcctcccaagtagctatgattacaggtgcaccacactatgtctggctaatttttaaaaaaattttttggcgacggggtctcactacattgcccaggctggtctcaaactcctgggctcatgtgatcctcctgcctcagcctcccaaaatgctgtaattacatgtgtgtaccattgcgtccagctctttttcctttttataacaggaatgtccaagccatatatgaaacagatccgacccacataataaaaatatggaccataaatcatcacgagttgttttctccttgtatttagcaaaagctcctcctgtgctcatggcaggctgagtgcctggcccgtgtcttcgtactctgcacagtatccttgtgaggctgagatcagtgtttttatttctgtctcacagatgagaaaacagtggtccagagagattaagtaggtagcagaaccagggaatgcagacttctcacaaagcaatacactgcttctgcctgaccatcactttgcctggctgctgcctctttggctaccatctgtctgccagtctctggggacactagttactctgacagtctagctaccagataggctccagtaagatgggaaagacctggatagaaataaaggcattctatgaacattacaccagcaactctttttaaaaaatagattttattttttagagctgttttaaatttacacaaaaatcttacaaaaagtgagttcccatatacctcctctccccttcccagtttctcctattattaacgtgttgcattgtgtgcacatttgttacaactgatcaacaaatgttgatgaattattaactcaagtccacagtttacatcagggcttacacttgctgtttacattctacgggttttgacaaatgcataatggaatgtattcaccattacagtatcatagaggatagtttcaccgaccccccaatcccctgtcctctgcttctgcagaacccctggcaaccacagatcttttggttgtcactatggttttgtcttttccaagatgtcatatagattgaatcatgcagtatgtggacttctcagactgtattctttgactaagcaagatgcctttaagtttcctccatgtctttcctgtctcgatagctcatttctttttattgttgcttaatagtccattgtcgggatgtaccccaatttgtttatccatttacctgtggaaggacatcttggcttcatcccattttttggcatatggtcatttttcagtattttccaaatggttagatttcatacgtgaatctcattgctcttagaaggtcattcagatgtgctcctgacctggacccaaatggcctggacccactgtcatcacctccctgtctggcctcttctcccactccatcttctttccccactctgcagaccctccagcctccttcctgttcttttgtgcaccatgttggatcctgcaccttcatccttttttcttctttttattcagaagactctcaccccaagtcttctcacatccagatctcagctgaaatgacacatcctctaagatgccctcctgacccccttactgaaagggttgcatgctgccaagcaaatgtccctcacagactgctctgggatttcctttactgcacttttcactctctgaagtggccttgcctgtttagctggccatcatctgtcccccacctctggaatgtcagcttcgcagagggagggaccacatctggcttatccctggctgtatcctagccctagaacagtgcctggggcctcacagaatatttgctggataagtaagtgatggattgattagtctgactactccagtgcttctcaagttgatggctttccatctacacatattgtattcatccgtgaaaagagagaagaaaccaggaaaagcacatctccaatgatgagggttatgtctctggcagcctgtattttggacctgggtgggatcatagtgtgtgttcttgtagcttttgcctgagtttcgtctacatggccctacttatggagtctaagatggagctgacagtgatgtatcattctaaacaagcgtgttgttgcaagaatccatttcaaagagatcctcttttaaatgctacttctctcccttcctcttcatctattctagcctttgaaaggtgtttatgttgattctgccattctccattcctgaggcacagataagcatcataaatatgttagttttgaacaggtcctgaaatttgccgacataattcccattttcttgtcagtacttccaagcatgaatagccttttttttcggtatggtgaattatctacagttagggatggtttaaaggtatttttatgaggacgtttagtcattgggatcacttgttcctgagtcatgcatttattttaagtctaagtcttttgaaaggtcatttagatttttcaaaaatagtagtcgtatcgttgtctcatattctttctccttgcccattttttgcttttaacaaaggaaattattttcaaggaaagcatcttcagataatgcacaaccagcccaggggaaacctagctttatagacacactagtgagatcgttgtgtaatttgatgggggaaggtttgtaaggtttgtgttctgtgtagaaaatggtgagattttaaaccaaagtttcattccagttatgaaaataagacatgtgcatgataaatattttcagatcagtgaaagaaataaaataatttttacccatagttcttctagatatcattaatattttggtgtatttccttggggtgtgtgtgtgtgagtgtgtgtgtgtgtaatttcatcagactggaaactctgagcagtcagagttcttgtctgtcgtcctcattgctctatagagagtactcctgagaagacactcagtgccaatttactgactgaatgaaagttaagtgtgtgtgtgtcacatatttcaaaacaaagtctagatagttctctatatttgattttgtgtccctccagcaatttctcatttttaaatttttctttgaaaacatgatttctaaatagtgggctgttatttcatgggatgaaaagttgtgttggaaagccccttcacactggaatctttgaaaccatcttcattcatttctttacaaaaaatctttagcagtgaaattcttgggttaaagggcctgaacactttaaagactttcatacatttttgctaagtaaccctccagagagaagggaacaagtggccttcccatcggcaaggaataaaatgacccatctttttatgttcccattaagagtggctttaagggttctcttgtaatgatgcatttttgttgtctacattagacttgttgtccctagtttcttagtagcattctgattttgctatggtatgttttcatgttcagaagtttgaaaaattgttaggtcaaatttagtatttttttctttaagacttcattaattgctcctatacttaagaaggtctccatcaccaagagaaagcaacctgctttctctcctggattattttcttctggctttcttgtaggttccttttctttccacttcagctcatgggaaatgcatttgaatgtgaggtgtagcttcctgatcattctgggtagcccagtcactcagcactctcctgagaatagtcttttttttttttttttttttttgccactgattggaaatgcacgtcttatagtattcccattttttacattatactaaattctctttctggactttttattttatttgtctggatctgccatgtcttcatgttaactgttttgataactacagctttattatatattctaatatccagccaaacacctcctttattatatttttttcaattttgagagccattctattatgtgtatgctacaagaagaatattatgagttatatcagatcagattataaaatacaatgagaattacataaaagttatacaatcattttggagaactgatatttttaccaaattgagtaatcccattcaaaagcctagtatgtctgtcctagtatttaagactttctcttttttttttttttttgagacagggtctcactctgtcgcccagactggagtgcagtggtgccatctgggctcactgcaacctccacctcctgggttcaagcaattctcctgcctcagccatccaagtagctgggattacaggtgtgcaccaccatacccagctaatttttgtatttttggtagacacgaggttttgccatgttgcccaggctggtctccaactcctgaacaaaaagtgatccgcccgcctcagcctcccaaagtgctggaattacaggcatgagccaccactcctggccagtatttgagaattttaaagtcaatataattctaagtttaaacgttatggtttcttcccagggagcacaacaatttattacgagttttatttctatgtgtttaatgttttgcattggttattgcagatgagatttttgttttcctgttaaactatctggtgattttgctaacactagaaaaaaatactaatttggattcattcattttgtaaccttaaaagagtgattcatcttactctcttagtatttatcttattacttattatttaatatttatgttaaataccctcttagtatttaaataaaatagttttcaagttggttctcttcagttctctgagtgtagattggttcatcagctgctcaaagggtgaacaatgaaaggggtgcttcctgtgaaatgttcccatggggctcatagtgcacctgagccgagacactcctggttcaagggcagttctgctgccctctgtctgtggagaaggcttgtctgttgaacctctcactgccatttcccttcctgcaggctgtgagcccaagaatgaagggctgctggatcactggtctttctgttttgctgtgagaggaattggtggtggccccctcatgcttggcctttgagcctgaggagggacgaggatctaccctgggtgtccagttactctttgagccaagtggtggatgaagactttgggggtgtggttgactcagaggccagagctgaagtgagcagaaagagcccacaccaccttccaaagcaccaattccaagtcagcaggtgaccttccagaagaattgtgcaataggctttaacttttattgtgcaaacaagtttctcacataattaactcaatggcctccagatgaaaacagtgacattaagaccccactggcttcctctgaattccctgacgaactcaaacttttcccatactggcctgtagtatctggatttctgcaaaagacaatagggttgattttggagtttcagactgtggaactctgtcctagttaatgagaagagtctgataaggccacccagagggcaagtgaggtctaggacgctgcataaacaaattaggaaatgacagagaggcaccaaaactgcagcacgtttcagctgtgtgttcctttctgtgtctctctgattcaatgtggccagtgttttctggagacttttgcaaaggtgggaatggggacacatggcactgtgaccccatctaggtggttgggcctggaggctactcatcaacccaccacccagagaacagaccatgcattcccagctcccaggagccagtgctgctcccggttcctgcctggatcacattagtgttcatggttgttaagcttgttcctataaagagagccctctccccaagagctggtaattggggaaagaagggctttttttctgctttgcttgttccaatcttgtgtttttgcttagaatatgaacacacatggtcacacacatacatgaaaagccagaacaaccagaggaccttctgtttgagcacccagactagacgcacagcagggaaaccatgcccagcctggttccctggggtctgggctcttggttctttcctttgcgattgaggaggaggcaacctgctttctctcctggatttaaaacaccctctacctctcaagtcctcacatcatctgtggaccttatcctcagtgcttctctagaaatgtcttattgttttctaactaaagagaatatgaaatttatttgcataaagaatcttttagtaatgagtacaggaaaaaaaatagtccgacttgagctggtgtaaatgaagagaggcattgattggttcaccgagctgaaaagctaagggcatcaggcaggtggctgcattcagtgatgtggaccacgccagcagggctctgctgtcttgtgcctggctctgtgtccatctgatttggcttcatcccccatcaggttctccccataagggaggaaatgactgtgtagagcccctgactcatattctcatagcttagcaatccttacttagtgatacggtttggaagtttgtccgctctaaatctcctgttgatttgtgatccccagtgttaaaggtggggcctagtggcttggggccctccccatggtgatgagttcctgacagctggtagctaaagagtctggggcctcccttcttctttctctctcttgctcccactctttttttttttttttttttttgaggcggagtctctctctgtctcccaggttggagtgcagtggcagtggcataatctcagctcactgcaacctctgcctcctgggttcaagtgattctcctgcttcagcctcccgagtggctgggactagggggcatgccaccaagcctggctaattttgtatttttagtagagacagggtttcactatgttgcccaggctggtcttgaactcctgagcaaaaaacgatcctcccacctcagcctcccaaagtgctgggattacaggcgtgagcccccttgcccagctcttgctccgactcttgccatcgaacgtgcctgctaccccttcaccttccaccatgagtggaacttcctgaggccctcaccagaagcagacatcagtgccgtatttcttgtacagtctgcagaaccatgagccaaataaacctcttttctttataaattacccattctcaagtgttcctttttaacaatgtgaaatggactaacctgggaaaacacatattttaaattttcctaacagttccagaaaaagtcctggaatggattctcattggcccagcctggtcacatgtccatcccctgaaccagtcatggtggccagtgaaatgtgatgctctgatttgattggccaggcctacctctgtctgtacagctgggtcactggggtgacagatgggagcatcagctccatccaagccaatggactgctgatggggacagggggagttcatcaggataagctgggcacgtgctactgtagtgatctgaacttttgaggggctcacaaccatggtgcctgtgtctctctaattcggcatgttgatcatgggatagcaaagggacgctgcttatggaagttctctgggcaccagctggaccgaggcaccacatccacatatcctccacaatcacagaggcaggaagggggaacatggagaaccgtgccctggctgggaaagcatccgcccagaaggggcagatgccacttgcactcctattcagttggccagaataagtcccatgtgcaggcctgggttctacaggtggggatgtgtaattccctcccgctgagaggcacagagcatttgtgagtcataatagagtctgctttcggttgccctgctggtccccagatatttaggtcctgcttcatgggagacagccccaaagtcccactcagtcactactcacagctcattgtctaggatctttgggtgatgaatcattatctttacatcgtgtttggacatggctcttctttattcagagacttatgacaagtgatctgcccccaccatcaaacacctaagatttaatcttgaaacagggataggataactgcagtaaacgttcagaaaagggacgatgaactgtcaaatgatcgctaccctgaagttctcccatgcaaatacagtgacattcccttctctgggggaaagagagttccttcattgagctggtttggctccatgggactaccttccagtcttcattggccttcttcattggctttagcgccacctttctgaagtcttccctttttggttatccttgctggcggaatcaaaagaagatattggaagacatgctcttcatagagtatgagcaggtgtctcagcctagaaaaatggagacccagggattattttctacaacgttcagtctcttttattcaatctggtgatggcttggacaataaaaatctctcaaaacttttttggtcccagttggcttcatctgccaaaacacacctacagtttttctgagatgtaccttttccatagatctaagaccctgatcttgtcaggctcccataaaagagctataaccatggtccctttgccaatgaattttgtcctagtttgctaacaccacataaatccatttgggatttttaaccacaggtgtgacagcagaccaattctaaaccaccctttgccagttaaaacctttttggctttcttttgttgcttttctcattggttctaagaagccagggttttttttccaatcttacaaaactttgaagttctagattctcttttatttttgccagaccctgttatctgcatagacactttcccagaagtactggttatattattgaataaagagagtagtttgttaccttcatcttaggaagggcaatttggtgacttcaaatgtgagagttagcacctacttgggagtaggaattgtccttagtatgttttaggaagaaattagatttttcatgccttgagcctcccctttgtccaggatgcatgaaggacctgatgggaattctgggtggtgttgggggagatggtgcaggtggaacactagtttcctgaggttgactcagcactttccattctgctgagtcagagtctcggtgccttccttgattaggtaaagccatcccttggcatctctgaagtgcagcttataggctacttgtagtgatatgggacatggtcttttatggggtcatgtgtattttgtcatctggtccttttgcagaacctgttgtgttctgacattcctgagttggcagaggaaaaaatcaggtctcagggaacatgttggtaagtggcaaagtcagggttgttgctcaggtcttcctggcttgaggtcttttcttctttctatttttgcagattggtttctggaaagatttatttaaatcctctctagttcacccctattcttgaatcaaaaggcttatcttaacaagcacaaaaagccccatttattcaggtattataaacaagaatggaaaagatagatgtggcctcatttactcatcccattctcctgctttttatcccacaccaggagtctaccaggctctaagcagacctcaggaaggatggggctgtcagatgtgagatgttagtggtcctcattggactgtgactgggtcctggtttttgaagcttgttttgtttcttgggaggcagcaataaggtcaagctggggctcaaagcatcatcgtaaccagcaaaatggggaccacagcagcgagttcactggctaggccctttaaaaggcaggcacacactttcaaatttcccactatttttaaccagcttgcttgcttgcttttaaattcatgtgtggttcctggaggcacttgacctctttctacagagccttcccctctgctattttaatgaacagctgcatcaatgactccctaaattccaactgcatcttcttcatcctcattaacctttaccttggcattcaagcctcttccaggcctcctcctcctttttcttcctcacctctcttaccatggctttccctcacccacttcttgatgttcctgcatcataccttcctttatgggaatgttctttgccacctgtcaggatcctacccacccctcaaggtctggttcaaatgctacaccttcagaaagattttgggggaaaaataaagtcttttttctttttgagtctaaaagtattgcacactcattatagaatatttataaataaaattaaagtcattcccagtcatatcaaccagttaatccctacaaatatttgcatattttcattcatctttcatgtatacatatatacagaaaatatttataatactgatgccatattgtatatataattacatatcccaattttaaatatagcatgtgtcttgaaaattttttggtatcattaaatgtttttcaaatacataattttcactggatacttgaaattctgttctacctctcttctacaattatgtaaacattcctcttactgtttggttgtttacattgttgtgcgtaaggctttgtctctatctctgattatgtatgtagaaatataagtatttttgaacagcgtaaacttttttaagctcttgacacacattgccaaacgttttctcagaaaggtggtatttgttttcactcccatatgtactgtaagctcatctttccaaatcttttccaatctgatgagttgatttttaagaaatcaactaccagtttggcaaaaatggaaactcattacagattcccctcaacttacagtagggttttgtcctgataaactcatcttaagttgacaatatcatgtcaaaaatgcatttaatatacctaatctactgaacatcatagcctcgcctgtcataaatgtgctcaaaacacttatgttagcctacatttaggcaaaaatcatctaccacagcctattttataataaaatatcaaatatctcatataatttatcaaatactgtttaccccgtcaaaattgcaatggtttcacgccattgtaaagttgaaaagtgttatgtagaaccatcgtaagtcagggatagtctgtatttaatttgtttcttttggggtaacttgtagagtttaattttcttttttaagttgtttactgctatattttttcttctgaaaacgattgaaaacatttgtactcttttcaatggggttaagagaagaggaagattttgtgcttcttgttcattttaaagaggtctttatatattaaggacttttttttcattgattgtgaatatattccagagttcattattttacttttttatatgaattttgaatgaaaagttttaaaaattcttatgtaatttggactagccattcttttgttcttgattggttctatttcttttaagcttaaaaattttatcttaaccctgaatcagtttttttccctagattttctacaactgtacttttcaaattaaactgaaatctatcttagtgggggtatgaaagatttccagtgtgacttttccccaaatatctgattatgattctgctatgcgttgcattgttgagaaatgcttttcccattggcttatggtgcttttgttcatcttgacctaacctatcccatatttcatgtagatgcaccccatgatctgagtaatgacacttccactgtggccatgcagttttgattattatagctttgagatgcatttccaggtctgttagatactcttccttgtcatttttttatactgtggtcccctcccagccataactttgcacactctcgagagttccagtgactgttgcaaatgcctttaactcttcagctcactgtgaacttcttgaggacgggactcaatttgtcctaatcaactacacatcctctgtatcatagcccatcatagcattggccagatagaattcactgaaaacacatttgttatgttgattgtgcaatttctttctggtcattttctgggtgacttgtatttttagaaaacctacaatcaggtgtattatttgattaaatttaggaaagaaatatatgctgtatttaattggcttgtgtttctcagcttcaacccaagttaattcaactttcagtgttgtttgtaattaccagacatttagtacattaatgaagacttctttccagtagcccatttatatttactcttgaaaaatgatttacttttgatttcaaaccaaaaacattatcattctaatttctggattctctcatttctattttcaacccaaaacattccgttgagatatgaaataatattggatcagcctggaaggagaccttgggtgaacaaagcgagtttgcctcatttctcacaacacggtctagggtctgagttctcattttgaatcagggtggaggtgggaaaacagctctcctgggtgcctgttgaatgtgtgcctttttgggcatctgtttacattcatgagggtccacagaggcccagagaaattccaactacttgagtttttttttctatctacattttaacacttaagtcgattcctggacatatctggtacttcttgtgttttctactaggcataggacattactttgcacagagcaggtgttcaatagacacgtttcttttaatgtaaaaaaatttattgaatatgaccctcacataacaaagcagcccagtagtccccttgtgtacccccacccaggtattcccagagagaaccactgtcttaatttacatcgtcttgattagttttacttgtttttgagtcttacataattggaactgaacaatatgtaatgttttgtatctgtcttcttttgttcaacattacatttctaagattggtccatgttaccgggtttgataatatttcatcattttctttgctgtatagtattccaatgtgtgaatatattctcaatttatccaatctactgttaataacatttgtgttatttctagtatttggctgttatgagtgatacctctggtaaccttcttgagctcgtttttgtcttttgctttttttttttctccttttttggtaaagaattgctgggtcatatggcttgcatatgtttggcattagtagatactgtgaaacagtattccaaaatgtttgaaccacggtcaactcccacagcagcatggaagttctagttgctctttaatctcccccacccacccttgatactgtcagctttttctaaacaattttagacatcatgatacttgtatggaaatattgcattgtggtttaattggtatttccttgaaaacgaatgaggttgagctcctttttattttttcatggctatttgtatgtcttctttatgaagtacctgttgagttttttgaaagttttaaaaattgaattctaggaatttaaaaaatatatattctggatatgagtctttggttgaagttcctcaatgtgctttgcctttacattcacttaattatatattttcaggaaaagaaatatttaattttaatgtaggtccatttagcaatcttttttcctttttgtatcttatgtaaggagtatttgcctacccacaaaccataaagcttttctcctgttttcttctagaagtgttatttgttttgctctgaaatttggaatcagaattaattttatgtatggtatgagggagggatcaggaatcaattttcccatatggatatcccattgatcctccaccatttggtgaaaggaccattcttttcctactgcacagctgtgttcttttctcataaatcagtcagtacactgcgtgggtctatttctgggctccatgttctgttccattggcctgtctgaacttgttccaatagcacatcatcataattgttggagatttaaaatcagtcatgatatctgatagtggaaatcctaccactttgttttttttcttcaagatcatcttagtcattcttggttctagacatttctatataaaaatttgaattaatttacacacatacacataaaccttttgtaagttggattggaattacattgaacttgtgggtcaatttaggaacaaataaaatctttaaaacattcagtaatttggtctgtgaacatggtatatcccaccttgtatttaggctatttttcttttttctcaataatgtattctatgtataggtcttatgcacatctttggctagatttattctggagtattttatgctgctttaatgacatttaagttatctcgtttaaatataattttctaattctttggttctggcatatagaaatacaatttatttttgtatatggacttcctatgtaagaaacttgctaaattattctaattaagattattttggattttctaaaaacatttctctggagaaaaaaaggaaagcttcattttttcctttccgatccttaaacattttattccttgttgttctggttaaaacctctaatacaattttaaataaagaccttcttgtctcattcccaatctcggagggaaagatttgaatatttcatccttaagtatgggtttgcaatagattttttgtatatattcctcatgaaattaaagaaatttccttttattcctaatctgctggcagtttctaatcataagtgtgttaggagttttatcaaatgctatctctgtatttgtggaagtgatcctataacttttctaatttattctgttaatgtggtgatttccactgattatttttaaatgtcaagctaatcttgcatttctagattaaacctaacttgttttccatgttttgtctttctgcatttctctgcctctggtttactaatgttttctttaggatttctgtatctatggtcacgaaagataggcctgtcattttcatttctagtgatgcccttttctggctttggtatgaaggttatgctggcctcttaaaattgattccctcatgttttttattctctctgacacttgtgtaagactggtattatttcttccttgagagcttggaggaatttactgtggggcccatacatccttcatcagatactcaaatgtttagaagaggtgacatcctttacgtgaggttccaagttaagaaaaaaaatgttaaaggtagaagcagaggtgcctgtccatattttctcctagtgggaatgattcatttgtatatttatttattcagcaaaaaatatcctaaatgtttgtagcacaccagacactgcagcagttaaggatacagcagaagtgaaacacacatgcctgccttctaggagttcacattctggaccaaggagtgttttctattccagtttgagagtgtgtgtccatgcacctggctgtgagctctgggtccctgtgtgctggccctgcccctcctctggctcatggtgctcactccactccagggctccaccccatgttttcagtctccacccagacattgcttcgggaccttcagcaatgaggttccctgcccctgctttgctcttcccttcaccctttgtgtgtgtgtgtgtgtgtgtgtgtgtgtgtgtgtgtgtgtgtgtgtgtgtgtgtgttgtgacagagtctcgttctgttgcccaggctggagtgcagtggtgcgatctcgatctcagctcactgcaacctctgcctcccaggttcaagcgattcttgtgcctcagcctcccaagaagctggaattataggtgtgtgccaccatacctgtctaattttcatatttttactagagacggggtttcaccatgttgcccaggctggtcttgaactcccaacctcagatgattcacacacctcagccacccagattacaggcatgatccactgcacccggccctcttcactcttcaactgagagtcctgctcattattaatgtcactttttttagagaggactttcttggtccctgggctaaaggagattctccagtcccctaagctcagagcccccatgctcttctctcctagcatttacatgttcataattcacacatttatctgtatgattatttttgttttaatgtcatttgttgtcaccaaattgcgggcttcatgatgaaaacagttgcacctcttctactcaccaatgatactcttgtgcccaatgcaaaaccaggcacacagtaggtgctcaataaatgcgccttgctctccttcctttctaaagggttccagaaggccattaataggcaaaaaacgcaagcgtgggtgaaggctgaatctatcatgctccctgatgggtccccatgcccagcactgggtgctctcttagtgttagtaaaatacatgaatgaatgaatgagtgaattaatggatggatgaagtgcaattgaaatttattatgctcataaacacaaaaattaaatagatttactgcattaagattattttaagaagttgttttattcctacattcattttgtttccaacacaaacagtacataaaaataattatttcttggattcatgaaaaattgaaagggcccttgagtgtttatttagtgtattctttttggcagaattaatgatcttaataatgaaaacagcactgggtgacttttttaaattgaagtttttattgagataattgtaaatgtgcatgcagctatgacaaatggcagggagatatcttgtgtaccctttcctcaattttcccccagtgctaaactagaatatacacacctaattgggatactgacacggatgaaatccactgaacttatcccactgtctaacttaattcacatttgcagcactgtgctgagtgctttatctcatttaactgtgacaacagccctgtaagggggatagcattatcactcaggttctagagcctgggacacccgtgctcagagaggtggagcaactcgctcacagcctggtgcatgctcaggggtggagctggaatccccactggaaacccaccccccagcccgtgttcttcctggtgctggcgtaaaccatgatatatagatctgttccttgttagagatctctaaagaagaaaactacttgcttaacaaaaatgactttgctatataaaggtgtggtttttttgactattcctccagaatggcattttttagaagtctgaagtctaagaaaacctctgcaaaaattcaaggcacttaaatctttgatgaagcactcaaatgtattcatttatcatccagtctttcagtttcattgtagacagatttatgtcctttgtgatggtagctccatgtcctggaatggacctcccatccaggttcacagatacagctaagaggctggaaaaggtcgcaagtggaaggaagcttgggtttgtagtttcctcacatattcttagaagctaggggctggggaaacccagaagttaggtggtcaagggcaaaaagattctcccttttctgtctttcttccccaaaccttgtcacatggaagatttgaaatggctcccccaggcctgagtcctgggcagctgtgtcactgttggtgcccacctcccaggctgcttgctctgccctgcttggagaatgacaacttcttaagttgccacacagtacccagagccaccagttcctctcctggttgctgtgtggctgagactgaccctggatcatgaggcatcctgctgcccagcccatcatttccatctggtcctgttggggaggaagaaaatgcagaggcaaatgcagatgcagtatctgtggctgggctccagcaagacccctccaaggtctctgaccccagggccagtggtttcacccacctggaccatctacaagggtcaaatccagtgtgtgcagtgcctggaattagaggaaagagacatgcaggtacagcatcgtgaaaggccccttttgatgctatagaaaaaaaaaaaacctccaaaataattttaatcatgttcctatctttgtttatatttcattatggaatgagatctggttttgacttatattaaggtgacctgtttgaaattgccaattttgtgggtcgatgacagctgaatattggcagttttaaatggttcaatctaatgcgagttaaattaaaaccttgaggaatatgcaacttttcactttacacggctctgttttaaaaagggtgtcaacatatttcagccttgcggagatggcggcgtatgtctatcctgtgttgcaagcagctgtgaatggttgcgtcgttttgcttggcctacgcatgggcgtgttgtcaccagaaagcgtctctgctcctccaagtggtggcaagcccctcctgagagccattcctcatccagacaagaatccatcagatcttatgaaaatttaatgtgtgaaagtgtacagttgcatgagggtttttttcttttaaataaattagtttgcagcccttgctaacaccagatgaatgaattaagaatgcacctcccccggggctgtcgggctgctaaactgcatgctggggcgaaattccctttctcttattcttagctttttctttttttttgaaacagaatctcactctgtccaccagactggagtgcagtggtgcgatctcagctcactataacttccacctcccgggttcaagcaattctctgcctcagcctcccgagtagctgggattacaggcgcctgccaccacacccggctaatttttgtatttttagtagagacagggttttaccatcttggccaggctggtcttgaactcctgaccttgtgatccacccacctcggcctcccaaagtgttgggattataggcatgagccaccgctcccggtctcttagcttattcttaaggggaatttcctaccttttatttttcttcttgagagagtttcaaatttgccagaacctgaagggttgttgtgctttcagccaaaaggatgtctcagtagcctttagcccaccttcccccagggcaatggtagcatggaacatgcaacccctagcttacttgaaagattggacttgaaaaaaatcagcagttccttctggaatctgcaaggattggggaatttgaaagattcaggggaattagttcggcttcccaaactagttggttttagtgaccccttcttcttcccgttgcatcactggtgtgactgatgttaacattattgttgccccgttttacaaatgatgaccctggaaaggcttggagggccctggggctgcctaaggtcataggccaggaagaaatggagcctgtccgagggcttgcgtctcctcattctgaagcccaggctttctccatgttttcaaaatgccagctggttgcattttgtttttccaaatgatattgtagatgccagaaagtggggcctgtgtttccatttcttggttttcctgcccttccagctctctcataggaggcatatgatgagcacagggaacaggcatctgtgctgggcagacctaaaacgaggaaggggcaccgtgaccagttaccttgcggtgtggcacagtgctatcttgaagaccataacatctctcgagcaggctagcatatctggtccgaaaagtcgccatttctttgggtgggcttgtacaaagtggtccacatctcacagggtggtctgctgggctctgcaggcccgtgttgtgtccataatacatgatcaataaacacaaaagctgcccatcaatgaatccaggtgttcacccggatgggcgtgggaaactcagacaggcagaggccacgggctcttctgtctctcaattcctgtcccctttgcatactgggggggcacttgctgggggtagtccagtaattttatctcatggtgctccaccagagaccatggtgctgatggcacctactaagcgcaacgctgtgcttgactctaccctctgagtgtgcccactcagggctggtctccctcatgcagcccgaggcctcctgccaaagtccacttcaaggggaagccgaaggtgcacacaatcccctacgtctcctttgatccaagtacatcagctcttccaaattgtgtttgccgtgcattttttttccagaatcctcttaagaaggatttaagaatcttgccaaagtggccacttctcctaaaaacatctaacccagtcctcgcagattccagaaggaactgctgattttttaatttatcttcagtcatttgctttcggaagggaacatttattgtgttgaaaattaaagacttgataaaaaatgtttgctttttgtggtgtccttgaaaatcgagtgattttcacccaggatttctgtagtgggtgtcaggcaccgtggatttctgtactgggtgtcagggaccgtggtacaccacggtgcttagaaaaatggatgatggaggtggtgctgtggctggctagcatttattaacattgttattgccaggcaccatgtcaaccctttcctatgcattagctcatttaattcttacagccactatttgtggcaggtactagtattatccccattgcacatgacaggaaacggaagctcagagaggttatgtaacttgcccaagtttgaacagttaataagagcttgcattcaaacccagtccattctggctcatggggcccaagccttgctctgctgccccaggctgtgtaggatgcatctgcggtggccattcttctctccagaggtccttcctaggactgactttgtggagattctgtgctggtaggtggcggggcaagacacgcctgtctctccccctggaaggagtcagtccagcaagaaacctgatgaaaccagtgactcccagctctgggtgagacatgatgatggggcgatggtgggggatgtggcagcacaaagcaactttgtccactgatgtcgggaacgccttttgaaggaagaaaagtgtaagttgttacccagagtagaagatggccaggccaggagttgggaagggggttctagaaggcaaagtgcgtgtaaagttcttgaaactagagatacctaaggaatctagatgaggccagtctggttggagcaaagggtgatgagtcgggaggctggagagtgacaaggaccagattgcgtggggaggatactgctgcctgggggcttcccatcctgagggcggaggaacttgaacacagtagttatttgctatcaactgaaatgtattgagcccctgctgctctgtgggcatacaatggttggacaaacagacaaagtccccgttctcaaggaacttgtattccaacagaaaagaaaagaaatacacaagacgacgtcaaagagtgacaagtggcccaaagaaagtaaaacaagggcccagtcagggtgactcacgcctgtaatcccagcactttgggaggccgatgcaggcagatcacaaggtcaggagatcgagaccatcctggctaacacagtgaaaccccatatctactaaaaaatacagaaaaattagccgggtgtggtggcgggcacctgtggtcccagctactcgggaggctgaggcaggagaatggtgtgaacctgggaggcggagcttgcagtgagccaagaacatgccactgcactccagcctgggcagcagagtgagactctgtctcaaaaaaaaaagtaaaacaaggtggcacctcagattgaactgaggaaggtacaggaagccactacagtgggtgggcagggtgggcacctctgtgcagtgggcattcaggggtgaggagtcagcactgtggcagtgttgggagaaggtattcctggcagagagggtggctgattggaaggccctgaggcagcaacaaacagggcacgatcagggacttccctgtgcagtcagcgtggctggaatggagggagcatgatggagaaggcaccaagtgaggccagaggctcctcagggggtttggattggatccttaatggaggggtgggaggatgccctggagggtttcagcacaggacggcaaggcctgctgtgcattgctggggatctctttgcttccataaggtcagtggaccgggaagtggccagaatggcagctgggatgggcaggggatgagggggacactcttgccatcatgcatgccacacatgatggggagtgggcttgaggggcagccatggcggaagaggagccctcaggggtttgggagaggttagcaaatactcatgcttgttttgggaggagcctctgctcacggtgggggcatgggggtggtggtgagcaccgcagcttgtaagaggcaagcttgtgtggctgctgggtcccacgtgctatcagatggactcctatatggtgtgctgggaaagacgccctgtggctctcaaccagctcagcctatggccctgagagaggatgtgggcaggccctgaccatcttggttttcttccctttttttcttttttatttatttctctttttctttctttctttctctttctttctttctttctttctttctttctttctttctttctttctttctttctttcttcagctttattgaactataattcacatattatacaattcacccttatacagttcacagttctgtggtttttgctacactcacgggtttgtgcaactgcaccacagtctaattttaaaacactttcatcatcccaagaggaaaccccatgtccattaagtgctccctccccacttcccctttccctacccctggcaaccgtgaatctactttctgtctctctggacacttcatacaaataggatcgtacagtgtggggtgtgctgtggcagggttgtttcacctaacaccgtgttttcaagttcacctgcattgcggcattgccagtttagggctgatagtattccatgatacatagaccatactctctttatccattcatccgttgatgggcatttgggtttctttcccactttgtgtctattatgagtagagctgctgtgcatattcacgtgcacatttttgtgtggacacctgttttcagttctacgggatctactcaggagtcagatggttatatggtgacccagtcttcggggcaagctcaggagcagaatcatcgtacggtgactcggtcattggggtctactgaggagtcgaatggtcatatggcgactcggtctttgggcaatggtaaggagtgagaatggtcatatggtgactcggtctctggggtgtggtcaggagtagaatgttcatggtgactcggtcctcaaggtctgctcaggagtagaatggttacatggcgactaggtctttgtggtctgctcaggagtagaatcactgtatggtgactcgatgttgaattatttgaggagttgccagactccttccatgttggctgcctggtctgcatcctccccactgtgtgtgaaggctctgatttctcacctccttgcccacaccttttattgagcctgaacacctttcacatggtcacacctgacctgagcagctgcccggccatagtgccaacacatccctggccacgagaggtggcgcctgggctggccaacgtgcaccctcagggtcgggatgtgatctagagcagggcttctctcattctgttcctgcccatgttcatttcaacccccaaaaggacttgagctctcaggcttaatttcatttacttaatgcatgaaggaggaaatgatttctgaggccaagaccggagtggtccccagggactccatttcaacagtgtatttaaaccaccacgtggaggttgcttgctaggctgggaactgtgatcaaagaacttccaatattttatgttcataaaggcagtttgagagtaatgttttttaaaaaggcatctgaatggggaggaataggatcattgtgaggtccacagtctctttgcctttgaagtttgcaagaagctactgaatgagttccatgctttgtaatactctggtctgggcaccctcaggcgtgcgtggccggcagggacctgtaggaatcctcttcacctggggagatttgaagcctagtgcatataaccagggccgtcacccaatgctgtgtgatcctgggccagtcagttagccttttgcagttagctgatcgttttcacctcagcttgaggcatctctttcaggaagtttctccagttccagtacacgctctcaagcgactctccccctctcctcaaaatgcttacctgcattttcatgatgcagctatgatgtgcaacattcactaattgatgtctgtgaaccctggtggctgtgtgccaggtaggtatgtgctcaggtgtgctgtgtgctcagtgaggctgtgaacccacgtgggtgtgagcccaggtaagctgtgtgctcaggaagctgtgagcctaggtgtgctctgtgcttagtgaggctgtgagcccaggtgggtttgagctcaggtatgttgagaggagggtggatgtgagcccaggtgtgctgtgtgctcagtgaggctgtgaacccaggtgtgctgtgtgctcagtaaggctgtgagcccaggtggatgtgagttcagtgaggctatgcactcaggtggctgcaagcccaggtgtgctgcgtgctcagtaaggctgtgaacccaggtgtgctgtgtgctcagtgaggttgtgagcccaggtgtcctgtgtgctcagtgaggttgtgagcccaggtgtcctgtgtgctcaggcagctgtgagtccaggtggatgtgagttcagtgaggctatgagctcaggtgggtgtgagcccaggtgtgccgtgagctcagtgagtccaggtgggctgtgtgcccaccgaggctgtgagcccagatcggtatgagcttaggtgggtgtgagctcaggtgggctgtgtgccttattgaggctgtgaacccaggtgggctgtgagctcagtgaggacagacaccacacctggttttgctcatgggtatcaccccagtacctggcccagagcagatgattgtcttgatttgggttttggggaggtgaccctggaatgaggatttgagagcaagtaatttataagaaagctgtcccaggagaagctggcaccagtgctgggaaagtggcacagggaggccaaggaggggtagtatcaggcacagctgtgcaggggcagttgcagcctgaccctgagggtactctgagcatgagtgtgtcagagtttgtctctgctgaggccaggggctaggctacattcttgccaccaccagtcattggctctcggctctgtgcaggaggacagagaggctgagaggctgggagttggcctgtaggggtgcccttaggggcaaaagcacatgggagctgggaggctccacagccttggactggaggggtgggcagagcactgacagtatccgcttggggtcaggccatgtggatccagtgttctactccgatcctctccgacaggccttccagaacagggtgtaccatgtgctccagcacgagggagacgtgcttctgatgtcagctatagcagtgcctccagggtcgatggcacgagcccagttgacaatccccacagccagatgctttgaaatatgtgatccttgataaatttttaatttagggtaattttaagtttgcatattgcatgagactttactgctctttgaaatctgcataaatcacagtcatgctgcatgtttgggttgtcacttggcatactggccagctttttgttggccccccaatcctacttctgctaagggctggcctggtgtgtgtgaccagaatgccaggcccagaagccaccagcactaagtcaatgggaagtgctttgctcagtgcagagctgctgctgctggaatcactgcaccacttattccccatgacactgggcctcctcgccaccaggtcaagccagactcaagacgcaggcaaacggaaaaatgcagaactgtttgctccttctccctccctggaaacccctgctcttataggttggctttgttggtccagccccagcttcttgacttggtagggagttccacaggatgaggacatgctttttgtgtttttctttgcactaaactatgtgtaacatcaaatttaccatttcaacccttttaaagggtacgattcatgtgtgccaatcatgctagatataatttgcattttcctgaatattaattagggggaacatcttttttatatgctgttgacggtttggatacctccttttggaaggtgttcccggactttgcatattttccacagggttatttgactttgttcatttgtgggagttcttttgatattctagaaactggactatgtccagttaaatatgttacaaacatcttttcctgcactgtgttttgtcttttcattttacagtgtttttgattaaattcttaatttaaataaccaaagagtacagttcagtgctctgtgcagtgagtgcagtcacattgttgcaaaaccatcactgctgtctaattccagaacctttcatcacctacaaggaaattgtgtgatactcctcattctcccctcctccaagcccctgataactacgcatctactttctgtctgtatgaattggtctgtgctgaacatttcatgtaaatggaatcatacgctgtacggacgctatatggacttttgtggccggctgtccccatgcagcatcatgttatcagggtccctccacactgtagcaggtgtccaggcctcattcccttttatggctggggaatgttccatggtctggatagactatacttgatgtgtccatttgtccgctgatggacatttgggctgtttttgctttaggtcatactttctgcctgatgtaaaagtgccagtcgtgtataaggactgtagtcagcgccaccatgccacagcttagagaagggatgggggaactactgggttgtcagaggcgccgttcttgaccctcagagactttctgtctcctggaggagaagtggctgtgttgggcaggtttgaatcttgagaattcacggtccctgggtttgaggcctcgctgtgccacttgatgccatgtgaccttgggcaagtcacctctccctctgagcctcacttttctcacctgttaaatgaggtacttataaagccgaatagcctaattcaaacattttaagtctgaaatgctctgaaattcgaaacttttttagtgttgacatgatgctcaaagaaaatattcatcagaacattttggatttcaaagttttggatgctcaactggtaatgcaaatattccaaaatcagaagaaatctgaaatccgaaacacttctggtcccaagtgtttcggatcaagaatactgcacctgtaacacctgcctccttagtggtgtgatgattgcgtggaatgagacatgaaaagggctcagcccaaaatcgtctggcaccaaatacccaatggataggggattttgtttattttgttgttactgttgttgaggtaaaattcatatagcacaaaattaactattttaaagtgtacaattcagtggcatttagtacattcatgatattggcatctgccacatgtgtctagttcccgaacattgtcacatcacatccaaaggagatcccatgcccattctcccctcccacatcccgcggcagccaccactctgccttgttgagtggtcttctgtgactggctcctttcgtttagcaccatgatcttgggggtcatctgtgctgcagtgggtgtcagtgctttcttcctggtaagagcgtaacatggtgcagtcattgtggaaaacaattgggtggttcttggaaatgtgaaatataggattactgtatgagctagcagctccacttccgggtatctaactaaaacaactgaaaacaggtattagggggaaaaaaacctgcacacgaatgtccaatagcagcactgttgttcacaatagccagtatgtggagacaacctaaatgcccatcgacagatcgatggattaacaatttccatacaatggactattaccttttgttattattattattattatagctttcttaactcctattgattttttcaaaagtgacctcagctgtcatctcttttccacaaagagtcttacctgagtctggagaccattcctttttctgaccacagaaccccgtcttaatctctgtcctgcctcttccactcattaattcattccctgattccttccaaagtatttgttgggtgcctgctatagacaaggtcactccagtggggagggaccgacaacaccaagtcagctgaaataacagcaccgtggagggagtgtgtgccatgcggagaattttgggttgggtgggagggtgcttggatgtctcactgttgctctgatggaccaggaggagatgtttgcaatgaaacccaagtgataagaaggaggcagctttgcaaaggtggaggagagcctcccttgaggggctgcttactaggatccggaggtggggatgagcctggggaggctgcagagaactgtgaggttggagctgctcacagggagaggtcacagggctttgagggccaaagggaggcctaactcctgtggaagccactggagggtttgaggcagggtaaggcggggtcaggggtgtatgccatgtgacccgaagggagggcattgcgggaacctgggagcgatgagggagacctgggccgggggagtcagggcagggcggatgtagcaaagtcacattgtcctgagtgaccattcacttggctgtccccgctcccaggcctcaggactgtgagggcaggcactgggtctcaggcccagagaagatgctcagaaaaggaaaaggagaccggggcacgagtgagccagtgcagtgtgcagagtgagggggcagtgggcaaagaaattgcatggcccagatcactcactggagaccagagacaccttagtgtcccaggatgatgaagagcgaggggccagagctaggggagttagtgatgcatctgctagccgggctggccctccctgtgggcacagagaaagtggttcctcaacagccatgggtgacctttaaggatgcccacagatggtgccatctcaggagaagggtcccagagggactggctctgtcacctgctgtcagctgctcccggaaagcccgcactgcatgacttgctggtttgttggaatggttccatcttgctgtgtcacttccatgacaatcaccagaggaaccaggcccaggcaaggggcctgtgatgaagcgagcagccctgatgacatcagaaatgcagacagttccagacattcaagcatgatgtccttggctcttgggtgaaaatcctcctcggtgtgtcagggaaagtcattgaattcacgttggacccggacttggtaaatcttcagaagcacgctctattctgcaggatttaagcttcagatgggcctagactggtatgcacaggtagggactgtgcacttgagcacagatggaccttcagcccatctccttttggttctcatatacttgttgagccctggctaggccctcctgagctctgtttcagggcctgcagaggctgctgtacaggtcacacttggtctctgctctcacggtcaagtagccaggatggacataaaactaatgaacacatacatcaagagctaattaaaaattgtgctgaaggccatggtggaaaaataacaggaaacctaacaggtgggtaggaagggtgagaccatgagggatgaataggagttcatcagagaaaagtgttgcctccagagggaatggcacagaaggcagccctattgtgggaaagcacttaatgagcgaggagggccatggtggtagagaagcttaagaaatggaggccagggctctggggttacagtgggggttttatatttcatcctaagagccactgtgatgtcatgtggggagcaatataaggccctgtttgcttgcttgcttgcggggtaggcaggagtggaagcgggaaaccagggcagaggctgcagaactgtacaggtgaaagtgatgctggactgcccccaggggttagaagtgaaatgaagataagagatcaggatccaaaaccatttattctctccctttttcttcttggggcacccagtagtattttttcccagaagacatttcttaaaggatcacttaagccaggaactgtcaaatgcacaaaccaaatgcactttctactagtttttgcaaataaagttttattgcaacatagccatgcccattaatttatgtcccatctgtggctgcttcacactacagcagcagagctgagtggcggcagcagagactgtgtggcccgcaaagcctcagagttttattatttggccccttacagaagacatttgccaattcctgacctaagcaaagtgagtgagggacgcattttcaaaacacaaatctgttggcttaaagtcttcctagcacttaaatgcatttaatccctctgaaaaatgctagagtagacacagtttttaaattgacttttgtttttctttaaccttttgctgatattatatataagaaactcaccttatgctttaggtttagaaagtcagggttggaactcagactttgaagatgttgtgtgatattatttctctaaatttctactacaatactaaagtctcctgatgtgttatttcactttttgtcctttctctgaaatgctcattttcctccttttctgtaaaatataatctcagggaagaagtttgtaaaagcagcttttagcctttgcaaagatataggtgggcctcttgtacaataatttttataagagtttgttctttgcaaatgcagatgcatcctactaagccacatacaaaaaaatcatcacaatgatgacaacaacaaagccaattttccagattccacctttctccttcctcatcctcttcatgtttgaatttgtgctgccaaattctatagagcattttcagatccacttgatttacagatttgagctgaatttcacttggaaaactgaccatatgtctggcaggcaccagcgaccattggcagtactatagggttgatactaaacagatgggctttctagttagatgtgctgttttttccacaatacatatgagaaagaaaagaagccactttaataatgtcttgatttttccactggtgtcagagtcatcaatgatgcccatttatgtagtcttaatttcagcatcattgcgtgcagggtgccttagacagctagaagaagcttaatgacttgggaaattttgaggcccaacttctgcctagatcttagagaatcttgttatctttggaatacagatagtggataaaagacttttatagtccaaaaataaattattaacactatttgtcaggaatacattcaaagttcttagtcctgggtttattgctcaaactatttgacagcttttgtggggttattgcagtctaggcagcaaggtgtaaatagcggttgtctgataggtctgtttaggaaaatctagctaaacaactgaatacgatttcttcctgcagaacttctcagagcctatactatgctaatatgcactggggctctcatgaagagggttttagtacagacagcattttctaactactttaatcctctcagcatctccctatgctagagttccatggaaaacactttgggaaacaccggtgtcatgcctagatggtaaactgaagagcagagaggctgcggcagacctgccatttaccagctgtgtgaccttgaacgagtgctttcgtgctctgagcctctactttttaaatgtaaaatggagctgaaaatataggccctgcctgttagggttgtttgcctggaatgaacatgcagaaggttttggtggcctccctttgggcattaaaatataagttctcctaaaattaagtatttattcaattcacaattttccaggggccaattattcactctgaagcttagccaggcttttgtcttttcttctctgtgcttcttagcacctccactaaccagtaaaggagagaaaggagatgccctttgagttaagggctgctgagggggcagccagaagaagccatggccaacatgaggtctagaggtggctcgggaattgcagttaccttccactgtcgggagtcagtgggacagctccaggccattgttaaaaaccattgccctgcatttgattctgcttccatttttgtatcatgggatcaatccactcattcatttattcactcgctcactcatttattcaacccacctgccaggcactgtgctaggtgccggaggaggaagcggaccctaagtctaggaattgcattgtgcagttgttgaggtctctgtttcccctatactggaaaagtcagcagttagtccatcaaacaagggctataatcagattacagattttgatgaatgaacttgcagggctgtagaaaaaagcctataagcttttaggaatagagccataggcatttagcagtattttcttcccttttttgaataaattcactcctttttttttttttttttgcatccctccctgccctccacccaacaccagcaagcagtttattcctccattataagcagtgtgactataagacacttgtcaaatggtctcactttgtccttggatggtatgacccttgttttgtttttattgatcagcacacccaaaatatcatgctcttcagtcattacttaggaattttctaggggtggaggaggtcaaaccaagaacttttacatttgggagattgaaatctatttctaaaacttgattttggaggttcagctccattctggtggtcactctctgaaaatgcccagcactttttctgtagatggctgtcaagccacatctcttgcagcctggccacaggcaattggattttcagtgctcagtgcttccgtgtgaggttattgtatgttgctttaaaggttaacttcttcctcctcccagccctatttctccttcctcctcccagatcttagacagcagtgttatcatctgctctgtgtcatctagcacaggactgggagaggggcggagttgtcaaagaggctgtggggttaagatcagggcttttacagcagatgacctgagttctaagctccactctgtcgctaactagcatgtgccctggggtaattatttcacatctgtgtgcctccattgtcctcatctgtaatgtaggtgatgaaaatagttcttcgcttgctagggtcttgatggaatacaatgagcaaattcatgccaggtgctcagcactgagcctgttgcacagcaaatgctcagtagatgcttccgttgctgatgacagtgatgacaaaaacaaaccttcgtattccttggctcttccatatgtgtgagtgcccccatcctctgccttcctgccttcagccttgttccccctacagtctgccatcctcaccgagattccacgtggtcttctcacaaggctgaacttgctccaggtccctcaatgactccacattgtccccaggactcttatcacagccacacagctcttcttggtcaggtccccacacgccttcctaagctcacctatgtcaactctgttccatagaccataagctccagcctaagggtcctcaagttccagtgcacagacccacaccagcaaattaagaacactaagagcaatgcagttgggttttcatttacgaatgtagaatcaattaatttttttaagagacagggtcttgctctgttgcccaggctggagcacagtggtgcaattcactgtaacctggaattcctgagctcaagcaatcctcctgcctcagcctcctgagttgctgggactacaggtgtgcataaccacaccgagctaatttttttttccttcgtttttgtagagacagggtctcactacgttgcccaggctgggcttgaactcatgccctcaagcagccctcctgcattggcttcccaagccactgagcccaggcctaaaaattctgtttgtttgtttttttctgagactatattttttctattatgtgtactaagttgtgatgaacatagatgattgctttgtgtagtgtgtgtgtgtgttggccattactgccataatgaacattagcatatctgtgtggatcccaattttatatgtggaaattttactgggtttctgagccttagagactggggacctcagacctagcttccccaaatgactccccattccccaaacaccatgtactgccatgcatttatgaatttgcacgttttactaaaatcctactcaacctctaatacccaactcaattatcactacctactacctcccctagcttctagtagccttcttagagttatcccaccctcaagcaggaaaagttgcttcctctgctattataatcctctttcttgattcttcctggtggttccaggtaccttagttttctcagtggtcactgagtcccccgggagagagggtacctagcaccactttgtccctcaggcctaacactgtgctttgttcaaagacaatggtctccacgtattggtgttacaggtaaggactcaaagaagaaatagaggtcatatctcagcttcttatttgcttctattgtggctcatgtcacattatgaggttgccttacactttctgtgttccttcttttctcctccataaatacatgagcttcatgcagcgggaaactgcaggcatgttgatggaatttactgctctgtcaaaactcagagcagtcctgacacacagcaggccctcagccgatatgatgaatgggtttgtgagtgaatgaataaaacaaacaaggaaaaaattattttgcaatattatctgatagagatggcacctttcttctctaagaaatcagccatgtagcacatggcactgagtacctgacctcactcccccagagatatggggctttccttccaatatgtttttggggaatttcgtgaagtggaaggataagataagatatcttagtggatgaaagatgaggatgaaaaaatacctgatgtcactaaagggtggacatcaaagtcagatggacgaggaacagaccctggctccagcgtttggcagccctgcactccggattcacagggtcgagcaggtgtttatttgggcagcccctgggtgccaggaaccagcaaagatgcgagacccagcaacaagcacgagagtgacggttctcattgtcatggagcttatgtttgttctcatgggaaatgcagatgacagtcaataaatagtgaatcccagggcacaatctgagagtaatcagagctaggatggaaggaaatgtgaataaagggattggccctgcaccaggcatggaaattagcctgtaagctccatgaggtcagtgttccgtcagtcctagaacagttcttgcctcatagctctgtgtggctgttgatgggggaaagggatggagttagttacccagggacaagtataccagctactgtgagcctgagagaggcctgggagagggctggctggagttgccaaagaggctggagcttgtcccttgagttgcaagcatgtgacatcagcaggggagggccagctgccccatccatcatctgaggactgaggctgtgtgtagcacttcctcacacagatgccaggtgtgacagacatttcccattaattaacctctaatgcctcagaggtggcagaggtgcagtggaacctggcactactgttattcagaggctggggggtggctgctaatgtgtttgcaccttccagagtctctccagtgtgagaaggcagttcctcaggaactgcagggagagacggggagagaattcctggagtggggggaggtgctcccatctgtcccttccctctgtggacaggtgtgcatgggccacatgcacccgcccacagatggcatcccacccatgcaggtgcacacccacccacgcccatgcacactggctccgcaggtgctcacccgcccacccgtgtaggtgcacacccacccatgcccatgcatgctggctctgcagttgctcacccacccaccctcagagatacacacctacccactctgtgcacacctgcccaccagcatccgcaggccacaccgtgccgtggatgaccacacctgccccgctgtacacctgcagtgatgggctcatgtcctctgcccttggaggggtttgtaagtagttttctctgagcagcactattttgaagtttctcttcttgggcggagagtcatagctctcacaagccctcccctggcacagtcctgggcttgagccaccccagggaaggcagaggggagagggaatttcctcccaagggggatgcagagcagcacagcctggggcccctgggcatggggtcttcactcctctgatgacagttgagccccttgaggagctgcttagactaaggcatctgtcctggtcaatgcattggatttttggtttaggagcaaagggtcttttgagctgaagaccctctagtggctccctgctgaattctgaatcaggttcaagtccctgactacgaccctgcctgcctccccagcacatccacgcctctcaaccactgtttcctcctgtcttggacagcctgcccctttcccatcatagcccctgtcctgttccccactggggcggccctctggagcacccagtgctgaccctgtcacagtcggtcagtcgacacctgccctcgaggctccctgaggaggccctgggtcctgtccttcctcgcgtctgtggggatcctggttcagggctctctatgtccccctggcacgtgcctgagctgttgctggcactggagatacagctgcaaacatccatcaagggcctgcagtcaggagcttcagctcggggcatgggcaggaggagtggagacaactacaaacaggtaaacaaatgagtgtgtgcgtgcatgtgcgtgtgtgtgtgtctgtgtgcgtgcatgtgtgcgtgtatgtgtgtgcgtgcatgtgcatgtgtgtgtctctgtgtgcatgtgtgtgtgcgtgtgtgtgcatgcacaccagctgatacctgtgatgagaaaaataaagaggaaggcaagaaatagtgaggagtgccatcccacatggggtgagccaggactgtctaaattcatacctttattcattgttcatctcctgcaggtgagtacagccccacaaaggcaggcatcgtctcttttgttcacctctgcacaccctgtgcctattaggatacatggcacatggttggtgtcagtacgtatttgttgaaaggtggagtgagtgagtgagtgagtgagtgaattcttaaagggagagaggagtgcagtctcctcagtggccaaagtgctccctcgccagccctcagctctgctgtgaggaccactgtgtgtcagagacggggtgggaaccccagaacctgctccagccactagggcagaagtggggggaggcagctgattaaaatagtgcaggtagtgacggtggtcctggcagtgatggtggtagggagggggaggcgccactgcccctcctgcccaccttccaccagtggaagcagtcacatagccacagcaagaaggagacaccataccccccagcaaggccctggcaaaggggatgcagggagtcaatgcttcaacctcctgttagtaagtggcagggccaggaggggagcctggggtgcctggtcccagcccccatgttcttcacagctacgtcacactggcttccatggcacatggcaagcactaatgcacaataaggatgataataagggggagggagcagcagagcacagagagctgcacaagtttagtgattaacttggattttgtcctaaatgagaagggaagcgagcaggaagtgatagggttagagctctatttctaagacatcggatcacaggaagaccagttgctggggcagggatgctggtactggaccagggttgttatgatgcaggtggcaaagaaagttgggttcagggtctgatctgtagtttattctgtgtgctactccgttttgccttggctgctaggaagctcagggcacacaaataccctcctctggagcccgtgtggtgtctgtcgtggggacccacctaactccttgatgctgtggccctcagcagaccctgattcctccagatccttcctgacactcccttcatccttcagctgtgtatgtgtgtttctggtgattgctgccgatcctttgtgaaggaggtgagatataaataaagcaatgattatgctccatcctcgtctcctctgctcatccctggagatcttcgtcttcatcttcagctgagcttggaggcttggggagacctagcccatccttcccctcgtgcaaagcatgctcaggacagcaggctttcccagggccatgtggagtcacagtcttgctcccatctggtgtctgtaggtggaggaaggaaaggagaggatgagaacatggaatgcattgtctctgagaagagaaggatccctgtacatccctctgcctcccgtggccttggggagagggtggccgggaggatctgtggttaattggtgttctgcagctgccctggttccacacatttcctgggctcccactgggtaccaggcactaggtgctggggtcgcctcaaaaacacagtggaggatgccattgctgtagctcccttaatggtttgcagagcccagaatgtcaaacaagacattcctgggcttgtctttccccatggggctgctttgtggagcatctgtggacacagcacctagcacagttaacacttgtattagtccgttttcatactgctacaaagtgcccccgataaaacaaaaaagaactgcccaagactgcatgatttataaaagaaagaagtttaattggctcaaagtttagcatggttggggaagcctcagaaaacttacaatcatggcagaaggtgaaggggaagcaaggcaccttcttcacaaggcagcaggaaggagaagtgcagggcgaagggggaggagcctcccttataaaaccaacagatctcaagagaactcactcaatatcatgcggacagcatgggggaaaccacctccctgatccaatcacctccacctggtctttctcttgacacatggagattatggggattataattcaagatgagatttgggtggggacacaaagcctaaccatatcagcactctattagtaatgcctggagagaatgacctcatgccccaacccacctagggtgggcctggtttatcctcttgtcttggtgtcccatccttctgtgttctgctttgggtcccctcgatgcagctttggaaggtgagaggggcctctggagtcagggtgctcaaggtcctgccctgccacagcatttcccagctctgagaccaacaaaaaaatggctcagggctctgatcttcagtttgttcatctgtaaaatggatataaaatggaatgatctctagctcatagatttattgtgaaggtaaaataggacaatgccttaggatagtcctggccctgcacaggcagtgaccagcgtttactccatcatcattattctattgctcatatcatagaaattattataatataaattttgaccaaaagttacctgcactggcatggtatgttaatcagagtgatgataaagtctagacatatagataatattattttacatggatgataacatgaactattaataaactgtgtattgtggatgtttatctttgttttcagattgtttttcattttaatttttttttagagacagggtctctctctctgtagcccaggctggagtacaggtgcaaatcatagctcactgcagtcttgacctcctaggctcaagtgatcctcctgtctccgactcttaagtagcatgcaccaccatgcctggggaatttccaaaaatttttttgtagaggtggagtctctgtgttacccaggctggtctcaaactcttgggatcaagggatcctctagccttggcatcccaaagcattacgattacaggcatgagccactgtactggccttcccagaatttatgaccacactgagtcctcccctcaaccttacctatcagggatgattatcatggcatcttttttttttatcaacagatgtggaaaccgaggctccaaggggccgggtggcttactcaaaggccctgggttagagacaggtgcagccctttggaagccagaccccgtggaagctctagaggctgccaggcaggccgcctgtcactgggggcacagaggtcactgccatgtggggccttgggccctcgggtgctgcctcatatggctcttctcaggctgagctctgcagagcccagattcagagcaggccgtcctgggcctccttggggcagccagtggcatgcatgggtgccttaggtgggaaatgcgggagtgtgaccccttccctgggtctgaggggcctggcccatcataatccccggccccttggacactggtaatgccccttcccctcgaacactggtggtctccttccctgtcctctctgacaaaggtgacctccttcctcaggtgagcccttgtgttagccacaccgtccagcccttctccctgcatgtccatgcttcctggggctctgaggtctgcatcagcttagggctcccagccccttccacaggtaacaaggcaaattcacctgctggctgtggaactgaccacgcgctgaccatgggaggctgagccagctgtcggggagtgtgtatgttcgcagggcgaggggtcctggcagaggtctgggctcctgtggtagcagccgtgctggggagcaccccacgggtctgcgatcttcctcccccagcgacactgggaggttaaatcggagcctggttgggactcaggtccttgttgctgccagaagaaacgtcccttccctgtcccaggaggcatctggggcaatgtgctcatctattctcagtcctgcctgggtgacggcctgaactctgctctacactgtgaccctaggatggaggtgacgctggcttactttgtgagcttctctaactttaccattttgttagttgcattttgtttcattctaactaatctttcctactaagggacacacggcttgtgctacaaaaacagcctgtgaagcacatctccctctctcccccgcctgccaacagccagggctccccatttctttctttctttttttttttttttcttctttttttgagacagagtctcaccctgtcacccaggctggagtacaatggtgtgatcttggctcactgcaacctttgcctcccgggttgaaacaattatcctgtctcagcctcctgagtagctgggattacaggtacccgccaccacactcagctaatttttgtatttttagtagagacgggatttcaccatgtcggtcaggctggtctcgaactcctgaccttgtgatctgcctgcctgggcctcccaaagtgctgggattataggcgtaagccactgtgcccagccccggggttccccatttctttggagggcccacagacattttctctccacacaccagtgtgtgcctgtataccacccctgttcgcacactggtggcgtgtgcgtgtgaatttgtgcgctggggttttctttggcctgattatctcagatcagtttcctgtccgtgcttggagatccactttctttctttctgcatctgcacacaggtggttgacaggacagacgatgacttacccagtccccctgtggacgggtatgtaggtcggtatgagtctcttttacaacaaacagcactgccatgagcttcctaggacgttcatcttcacgtgtcccagagtctacaaacatggccgtttcatggacaaggaaggggtccaggagcactgcttcctctgcctgctcacagacgtgctcacagacgtgctcactctgcagccgtttgctcagaattctcaccggcctggctctgcgttgggttccaaggctgccccaggcctgggctctaccctagaagaggtggcagcctggtgggagggcaggcaggcagaggtctttgcggctcattggtgcctgcataggtagcttcatgggcgtaagacaagggagtgaccctgtctgggacaagaggaaggtaaagactctggacaaagtcctattcaatggaggagctgaagtttatgaggcagagaagcggctgggagggagagcagcgtgggtggagggcagagcacgagcaagggtcctgggcaggcagcgtttcatgctggaattaggaacatcttcacacgtggcgcgtcatatggcggaaggcgaaggcttctggtggccgtgagtgggtcgcaggagggagggtctcacagagggaaattcagcgcacgctgctgagctgctgcggccactgtgggtgcactgctggacaaccatcctggggtccaggctttggggggatcactggtgaccccttagggtgagaggtcatcaccttgggcccccaggagtcacataggtttggtggccacttgaggacccccttggttttcgtcttccagatgagatggaccaaacgcccccggcgcgtcctgaatatctggtctcagggattcgaactccccctgtgaggaggaacagcaaactggccaccctgggcaggatcttcaaaccctggaaatggaggaaaaagaaaaacgaaaaactgaagcagacaacgtcaggtaaaggcctggtgacaggcgcgggcaggctgtggctgggaccagcgtccttggcatggtgctgcggcccctgctgatctgtgacttcctggcccctacacaggaggggcagatgtgcttcatggcctgtgatggccaggagccatgcaagttaccccgctggcccctccagggcccacctggcctccctgaagccctggggtggagttggcaccaggcaccccatgtgggacgctctgcccagaccctaaggtgcccacaagtccactgggaccttgttaaaaacgaagcctctgatttacttagggctgggttgggccgagacactggctttggagcaaggtctcacttgctggcttcacctgggtggtgagcccccagcccacgcgactcccgcaccacctcacctcccacacctgcaatctcacttggaggatgctggggcctgggtcgtacccccacagatgcaggtttagttggccaagagcctcctgggtgactcagggttgaggccgtcggtttggctttgacacctctgggcctctcttcttcctgaaagacagaggctgctcccctgctcctaagctgtctcagtgtgccttccctacaccctcccaccaaagcatccagaaggttcctccactcacctcctgctgccccctcacaccctgccagccctggctctgtgggaagcgggattgcgatggctggtcccgttgcccccgcctcctcggaatccagcttgggaactgcagccatgaggctgaaccacagacagggtggacacaggcagtgatgacgggacaagcagccgtaaggcacataacggcagaacacggccccccagcatttggcatggaggagccaactcaaccctcagaacctcctgctaggccagcactcccgcaggatcctgccccatcggaagggatggggaacaggcccagaaagggaaatcactcacccagggtcacacagccagcaggtggcggggctgaggcttggaccctggcagccgggtgtggtggctcgtcagcctgggctctgcagatggcagtgttctgagaagagagcccggaggaggccgcatctccaccccagggccccgcctccagccacatgcctgtgagccacacctaaaaacaattagtgagggagctgctgctgtggaatcagtcccaggcctcaggaaccagccctggcgagtgcccgtctcaggctgttgcctcggggggtccctggggtcccatttcctttccagctctgaagaggcgcaggctccagggctttgaggatggtggagacgaaggccaggtgttacagcgcccaggcccacagcaggggaggcggccaacaccgacagcaggccctccactcatgcttttctgtgtgctttacaaaattattattattatttttaccaaccaagaagttgatagatgaattcttgttgaagtggaaacagaacaagcatcatcattcggcagatcttgagcacctcctgtgtgcccagtaccaacaggaggggcccaggccctgcccacccagagctttccgcagagtagggagtcgagtgacaaagtgtggaagccaccaagtgaaccagcacgtgagtcgattgcagactccggcgaggctgcaaggcagcctccctcactggatgctaggctcagctaggtgggcgggttccatttgttcccctgcatctggcagggccccttgcacacacacggcactaatgggctcttagtgatccaggcttaatggcaggatcacggagcaggccctggggggtggaaatgagcagggcgggcactgctttgggcccagtggtccgagaagacccaggtgaggaggctgcattgagctgagatgtaattggttcattgagaaaggcagggaagagcatggcagcagtgggaacagccctcgaaaaggcagcgagctggggaaggcacgtctgtgcagcagtgaaaggccgggggactagagcagagtgacctccgtgacctcaggggggtctctgacattctccaggcctgctgaccccagcagtggaactggaaggctgaggtttgtcttctgaggactctgggctctttggcctactccaagctgtgccgtgtgagttcaccagcaagatgctctggggaccctgcaagggcattggaggtctcgaggtttttacctgcagcatccccaccttcaggaccgccattcgggcatctggaaattcgaggaacagtgctgcattttgtttacttattccaaaccactattttcctttaaagcagggggtgttatttgtttcagcatatcaaattcctgatttcacgggcatcacgggttaggatgagttgaagtgaatgcaaagatgattgaaagagaaatatgtagcaaacagtggttttggtaggcgaggctgggggaaccggctgaagatggctctcaggggctgcagggtggaccagcatctcagtccatgcctgccctggcaggtggctcagatccactcagccatttacacactgtaccaccttcacaagctgcaccaccactgacgtccccatccccgagagggggagggtagagcctcgcagctgcatctttgggtcatcgggaagtccttgagtcagtgcaggcaaagacctgtgatgtctgaggctagccaccatgagcaccgcctggtgccggcctggggacggggtccacacagagctcgaggcctccacccctgttcttcttatctgctttgtgagcctggctgcagcctctttgctgacacctcccaaggtcagcattcactttgtcaattttatccacaattctggcacctggaaattggcttggaaattgggaccacagaaaggaaattctgttttctctgcccaaaaatgtccccaccctgctgtgtttgggtttcccttttcatcctttggctttagggtaaatatcctcagggaagccacccgggaggtcaaggatgggatgggtttccccagacaactgccccccagtcagtcccccgccccaggcctgacttattcctcctcgcccacttctagacacttgccatctgtcctcccacctgtgctggcatcaggcagaggctgtgcctgtcttgctcatggcagaatctcctgtgcctgacatggtgcctggcacacagtaggtgctcagtaaatgtgtaaggggtttccatagattgaacacctgatcaccatggcctgttcccccagtggagccccacctgtgaaggctgcagggcttctgccctccgtgactccccagcacccagctcagcacttggcacatagcaggtgctcaggaaatgcttttgagtaagtgaaataattccattgccagtgcctgtttgtcatctgcctccccaactagacattaagctaagccaggtgggctgactctgtctgttccccggcagctggcagggccccctgcacacacagaacactgatggactctctgtgatccagggttaatggcaggatcacggagcaggccctggggtggaaatgagcagggcgggcactgctttgggcccagtggtcggagaagacccaggtgaggaggctgcattgagctgagatgtaattggttcattgggaaaggcggggaaatcatcacagcagtggaaacagcccttgcaaagctgcatctttcaaagaaagggttgaggtggttatgtagtcttgtatttggaaattggggctcacctgtaggcaaacagttttcctgacggaaggaagaagatgattgtggagcagcccgaggcctgcctgtgaaagaagggagaatgggacaaggtggtggccgtcgctcaagagtgttttgctccgggaaggggaggcagaaagggctattctgaaggcggaattgacaaagatttggcaaattaggcttggtggaaggggactgggggctggcctcctcccttcctgtccatctggtagactggaagcttttaacctgggtttattggaagaagctctagtgggagagccgcacaggagaatctcatctgtgagtggatgttaagagcggccaggaggcacttcgcaaaggcgaacaggaaccacggaaaggagcccggggtgttggcggcagagggagggcactttccttggttggtaatttagggaacatttggtgaagggcaggaatggctggtgagagctagcttagagaggggcgttatatgtgcaggggctttccagataaatcacagaaatgatcgctgtagaatatctactgcgtgcactgctctttagctgtggtttatgcacattgcttagcagcactcttggtaagaaagttgggcctcgccagtggactaggccccctaaccccgaggcgcctgctagctcagtgtttttggtctgtaaacttgagcctggcattggctgtggcttggacagggcccagtgacacctttgcctgagactcacctgtgtgtttgtgtgttgggcagcgctggagaagaagatggccggcaggcaaggccgagaggagctcatcaagaaggggctgctggagatgatggagcagggtaagtgggacccgtccctggcttggaagggcacggtgctgggaatgcagaatggaaagtctcacatgagcccaggaagcccatcagaaacagtgtagaatccaaggagggccgtgttcagatgaagcctgcaaggttggagagacaccccatgtcaggagccattccattggtccagcccccaggggcacgggagaccccattactgagctgaagagctccccctcatggcaccactcctctctggggaatgtctaacagagctgggtgtgcatgaatctggtggtttatcccaattcctttaaagtggtagcagtggttttttcagcattaatttttttttcatattcacatttcagtcctccatttgggcaaattatttttaattccactattacctactccccctaccaccatgtaggaagcattcaggacatgctggggcggggtgggatattgtgcacgccctgtctcattggtcttcccagcatccctggggagagaggcagcggctatcccacttgcagacgaggcgtgggagggtctgggtggtgactgccccaagtcattgcagcctgagagcagagacacagaacaaatcctgatctcttggtctctggtctagagagcttaatctcagtggggtctacataatcatctttgtttccatctttcagaaaggccagttattatcactcatgcaattaactgaacagagttctttaattcccaagtctttctctttgtgatggattcctggaggtgtgaggcccaggacttagatgctgacactagcccttggtgccttccggttccctgagaggctaaatcttggttaggaggtttcacaacacctcactgcctctggaagactctctggagctggaccaagctctggcctgctgatttgaggaatctggccatgcatagccagtttcctgaggcttgcatggatatattgaattcctctctccccacttcagccttaaaatattactagtgtctttgtaatttggcccaaatatcaggaattaggaaggaagctcatgaaataaacgaatccagattttatgcagccgggcctgtcagcacacaaacccgattgtgggcccaggcttttgtcattgtttcctctctttagactcgaagagtgaagtattttgatgatgctatttttaggggaaatctacatgggaaattgcttcatagtgataataaaaccttacatgtgcgaggaaagcttggtgtcaagtcccgtggcactcagatggttaacgccgtcgtgacgctcggatttggcggaatgcggttgctgagctagaaatctggaggattttcactgggatgggacaaaaaagtgtcaaactccggcattttgaatatgttgccaacaagcatacctttggatcttagggaaggagaaaggaagatgaaaacaatgctaaggccttttctcatctattctaaaaaaaacactacttttgttgagtaaagagtaagtatatagatttggttcctctcaaaaatgaagctatagtttgactaattaaaggggaaaacttctaggagcgttggcttttttccactctgaatttttgcaagatgactttgtctgatgaagtcatagcagaggctggagacgaatgcttggccgcggccaggctgacagtgtggctctcaccctgctgccgtgggagcctggtctctggcttccgtgcctctgacggcgacatcacacacccgcaggcttacagaatcactttagatcagggtcggcaaaccttttctggagagggtcagatagtgcatatttcagggggacgtgcagtctctgttgcaactacttgtctctgcttttgtagcgcaaaggcagccggagacaaaacatgcatgagagggcatggctgtgtcccaagaaaactttatttatggccactggcctttgaattttatataattttcatgtgccacaaactattatttttcttttgatttttttttcttttgtcaaccatttaaagatgtcaaatccaggtgggggagctggattggtccccacattgtggtttgctcatctctaccttccatactctctctcttgctaaatgattgtggaccagggactagagtggcctgaaacacagtctctttccttgagagggaaaatgcactcctaaattgatgccatgacattttattgagggcccactctgtgtcagggtctgtgctagctgctgaggacacaggtgagcaaaatactgttctgaacgcacatccagtggggccattaggtaatcccacaaaaagccggcaactcacgaccacagtgagtgcagtgaaggatgcagcaccctaagatcatgagacaggacctgacctggttctcggggggccgggagatgtttgagtcaggtccaaaggtgggcaggaggacctaggctggttctcagagtctgttgcatattaggatcacctggagagatttaataaccctccaccgctcaggcagcagttaaattagatgcgctgggcgtgggacccaggcagcagtgcttcctcatcctccacagctgattccgactttgatgcaggaaggttgaaaagccaagagacagaaggaagcggggagtgacttccagcccacaggagcagcaagcacaagtccccgcggtggaagggaccttgagatggtgggttgggttggaggaaaggaggaaggaggaagcaggaaagggagaggggcttgggtcaagacgcctcccgtcttccctgcccacacaccggctggggtggcagaggcatgaccacgctgctgcgggagcctggggcggccacagtgcgagtgggtgggatctgcgaggagcccgagtgtctctgcagggaaatatcagggaccgggcagcaggggttgctctgggaggggacttggacttgcttttcgcagtcgactcttctgtgctgcttgaatcctttactgtgtgccacctgtaatcaacctgtaatcaacgtgctgtaataacgggatccacgcagatgcttggccacaggctcccggctaaatccttccctgcaccgcagtttccgtcctgcactagcttcaaaaatgtcttttctcactgggtcgacctgaggtcagaccctgtctgtccctaatcctcctggtgctgggtcaccgggtcctcttgcaggatgactggaattgttggcggtggctgtgcacctgccctctccggctcaggggaggatcaggcttgagggctgttgctctggggtaggcacgcagtgccgccgcctctgctgtggatgtgaggactctccagggtgaggagcagaggcgctttcctggctttggggttaaggaaccggcttcagggttaaggaaccggcttcagccaccgccttccactgctggcagggacgaatctgcagccgggggcgccctcctgtggccggccaggctcatgagcctccctgcaaggtggacgggacttcatgcaggacaggccctgtgaggctgtgggagtggattgtcagggactccagagcctcatttgagccccctcgaaactcacatttgaacttccttggccaggacaaaccccaggattgccctctgccctgcacacgcgcatgtatgcacacacacatgtacatacacattggacaccctggagcttgccctgaagcaggtgggcagcctggtggagtgagccggactctgggcagggccagcagaagagagcccgccagctcccgggggtgaggcagcatccagggcatgagtttgctccctctggggtgttactttatgatcgatggtctgttttatgaaccactgtgaccccctcccctctcgttcctgtgactctagtcgccagcttggacctaggaaggaccctgctggtggcgttattacatgactagatgtgtgcagtggagcccgttgtgccctggggagggcagaggggacccctctgatctcttcagtgctccttccaccctcgtctcggatatccgtgactaagtgaggccagaccaaatctctggtacaaggggtccccttccccagcccccttgccctggtccccagcccacgtttctctgtgctagacactgtttatgttctgaatgactttcctccatctccctgtatgcgttgacttggcattttcttaaataatttaaggaatttcctaccccgtcattgggtataaaagaagagagtttattactctgtgctgtgttcagtgacttgagattgactaggcattctttcctcagggaattggacagtgacaaatcaagtctatctggtttccatgtggtaggaacgccgggggacacatgtctgcacgtgtgcacacacatgcacgtgcacctgtgtgcacccacctgtgcttgcactgtgcacatgtgccacgacacacgtgtgtgcctgcgtgtgcatctgtgagtgtgtgtgcatgtctgcaacacgttccctctcactgtggctgctcaggtgcactgccccgcgctcccctctgcagccctcagaaggagagtggccgggcggaggctggccttccagcgagaggagcagggcctgggctcccaccgctcccccaacccctccccaaccagcgtttcttagcaacggccctgccaccagggctattttgggaactgaaacttttcactgaacatgattatgagctggagctctgaccgcagcccagagaagtcctgcaagaagtccttgcagaaaacctgcaagaaagcaggggaaggttcaaagactgtggaggggcatggtgcttttctgagtctggagacctctgggccttccaggttctatgttctgacctttttatagtggcagttgtgatgattttgatgatgacgatggaggcatccttattattaacagcagtgacagtcatggcagcaaaagacctgtgcattctaaggtttggtgtccataactgcaagtggtgggtggcagccttgcctgtcacatagggtaggtgtgaagctcaagctggcagagccctgtgctcccctacgccagctctcacattccctgtgtgttgccaggggctgggtaagctgtgctgtcacggttgcacgtcaaatgcgagtaagtcggtcacgagaaggggctggtttcagttttcagctttgtgacctctaattttgtctactcggtgagctctcttggcttgtatctgggttggtgggctgttatagccaagggtcaaatgtggctcaggacctgtttttatgtggtctttgagctaagaatgctttttaaatagaaaagactttcataaaaattaaaaaaaaaaaatcaagggttgcagcacgggggatacagcacgtggcccacagagcccgtcacaatggccatctgcgccttatgggaagagcctgccagcctcgcctggacctctgggcaactgacgcggctgcatggatgagatcgtccagccctaaatctccagacttctggcatggctgaccttttcattctccccggaggagacgtgtgcggcagagggaatatgatcagcagcgatgacaagctcaaatctcttccagggtcccaggcaggaaatgggtctggcatgagtcctgggtgtggtgaggactctggagggagaaacggttctgtcctaagcctgctgttagcagatgggcccaaaggtgcagaccaaggggccagatcactcttgtcaccctcctcttctcgttgtcagaaaccatcaccaacaacaatgacagaaagcacatgtaaagtgcctaccttatgccagacacattccataccctagctccgttaattctcactatgttgccatgaagcaagcagaaatattatccccattttatagataaggaaattgagatccagaggaatttgctatttgggcacaaaacaccgtttgcaggtggtgggacgcatgatggggtgactgtatactgtttgtccaaacaggacacttttaggagtgaaagggacactgttgaaggacacagggatggcaggtaggaatcgggactgaccaggtcctatggaccctgaccctgaagtaaatgttgcctcctccttccactgccaggatgggacgtgtgtggaaggaggtcagcgtaggctagcatccccaaacggccacctcgtggctgtgtcgacatgtgcaggtcacactgccctctgcaccgggcctccaggaactgctgtagagattgagaggagtcctgcagggctatgtggaggctttgtgcatggggctgtaacgtgcatctcagtgacgtgactgtgacttgctggccgagggccctgccatcctgcagttgggtaactgagccatttattttgctctccaagtgctgagcccctcagcattaaggtgcaaacccagggatggcaagtgaagggccagaccctcagaggctgcagcagccgagcttcaagagacggaaagcaccaggtccttccttatgccctgctagtgcctcctcttctgggaaggctgcctgtcagacctagggacccccggctctgtggcccctccatccatgggtgtgccccgttcctgggctcacggtgccatgtgtggtcatctgcgtggcttcctcagagtgtgagacccctgggggcaaggactgtatcttactaacctccaccttgccagggtttattacagtgccagacacgtagccggtgatcagtaaacacctgtttaatgcctggctgagggtcaaacggtgggtgcagaggtgagttggttctctgcagccatgacaacccctgcatctcagagacctacagcaatcaccgtttgttgtcccctgtctgggttggcctgtgatctgccccgtgggtctgctgactccagccagctgctgggcatgtcttcaggacaaaggtccagggaaacaggagggacgagcagggatgtgcaagcacttctcatgccagtgctgcatcatacccactgtgtcccatcgaccaaagcaagctccagggcagaggccggggtcagagtggggctactgcaaaggtgcacggcagtgggtgtggacgtggctcaggggcactgcagtctcccacaggtgtcggaggaagagtgcacacagggagtggagtgtaagagcagaaaccaggctagggtgtgctgaggtgcccagggctcccctggaaagtccagacttggagagggactcctagggtgtgtggtgagggggagaggggtgggggaccacccagagcctagaatggatacttctcagaaagactcttgggacgacggaagggatgaaggaagggaggtgcaggcccagctgacagctacatttccttgtagatgctgaaagcaaaacttgcaaccccgatggaggaccccgatctgtacagagtgaaccacccactcccaagtcggagacgctgacttcagaagatgcccagcccggaagccccttggccactgggacggaccaggtctccctggacaagccactgtcctcagctgcccacttggacgatgcaggtactggctggagaccacgcgaagttgagctgctcctagaatggccatacgtccccactgttgtccttggctatagcttaggcaacagccctcgtagaacattgttctccagagagctgggcccgtgctctaagcgctgccatgctgtgctgcctggctgggttgaagtgtttgctggggcacttttctctactgtctctttccaagtctggcacggctgataagtgaaggtacttaacgatgttcatctccctggcacacctaccccccctcccagggcgtctttgtgtttccctgggaacttctaggcaggaaagtgctctctggaggggcaagtgcccagtggggggattttagtgaccctaaaagggtaggaggtagggttgagggacttttctgtggccgaaatcctgccacagggggcctcttggcctaagagatgctgaagtccctgcatgtgtgcatgcctgggagctggtcggtgctgatgcagtctcagcatgctgcagcctatgtggggctcttccgctgcttcttgaggggaggtgggcttggtgccttgctccaagcctcagtttccctctgttaaatgggaaaagtaatggacctacatcagggttgtttggagggtgggaggaacttagcagtgtctgacgtgtagagtgactattatcaaaggcagtaggggctttgcgtagtggtggtggtttttattttaattgaatagaccagggcgcttcccaaggataggggagaagggaggaaggatagaggggaggaaagcaggaactggccacagacacctgcagatgcttcaccagctcctcctcctcctgcccacctggcagagtgattcttacggagcttcactgttgacttggaatcctgatgtctcgtaaaatttcaagctataagcgagtctcacacggtttgggggtgggaaggtgaacgcgtctctccgtgagtgtgggaggttggaaatccaggccccaggacagcctgctgggcttctgcttcagagcgggtggacacctggtcctccgtgcccgggacttccttctgccacacaagggtggcaccacacactcgcaggccgcccgtccacaacgcccctgcagcgctagcggcacctgcccagaggcatgctcagccctcttcgggggtggccgtgtctctccagtttcacttggcttggaatttggggtctgagagttgtgacttctggagggtcccagctctcacgcagaggccccctccacacacacaggtctctgtgtgccccaggcatctgactttggggctggcgtggttctttttttttttaatactttaagttctagggtacatgtgcacaacgtgcaggtttgttacatatgtatacatgtgccacgttggtgtgctgcacccattaactcgtcatttacattaggtatatctcctaatgctttccctccccctccccccaccaagcaatggcaacaaaagccaaaattgacaaatgggatctaaactaaagagcttctttgcagcaaaagaaactcccattggagtgaacagacaacctacagaatgggggaacatttttgcaatctactcatctgacaaagggctaatatccagaatctacgaagaattcaaacaaattgataagaaaaaaaccccaccacaaagtgggtgaaggatatgaacagacacttctcaaaagaagatatttatgcaacccgctggcatggttcttaaggctgagcagagcctggccttcctgccgtggtgtggtccccacagcccagcccttgtgtgtggcctgtgagcctccccaagggaggcagggctgctgctcccagcccttgatgggggtcacgcttctccttggcagtgatttctgtagctcagctcagggcctgtgcctgctcccctcagtgccctcttctgacctcagacacgctcccgctctctctccagatgctgggtgtgcggatgggttcctgagagcagagtgggtctgttgagattacacatttgtatcagggaccctctcctgagtgaggcctgagggaggagtgggaatcagctgggcagagagcgaggtgcagagcatcccagaaaggggaatgacatgcaaagacaggggacaggaacacacacgttttctgtaaagggccagagaggaaagagcatgagctctgcaggctggaggtgtctgacacagccactcgcctctgccccctggtagcacaaaagcagcgtcggtggtgaaagggtggggctcttgtcggtggaactttagtgattaaaaacaatccagggcccggtgaggtgggtcacacctatcattccagcactttgggaagccaagacaggagaatcacttgaacctaggagttcaaagtcatcctggacagcatagcatgacgccatctctacaaaaaagttttgttttttgtttttggttttaattagctgagtgtgtgggcacacacctgtagtcctagctactcacgaagctgaggcgggaggatagcctgagcccgggaggtcaaggctgcagtgagctgtgatcacaccactgcactccagtctgggcgacagagccagaccctgcttcaaaaaaaattcaaaataaacagcccacagaatggagagagagaagagacctggcaggttatccctgagggcagctggaaccccccagggatggagagtcgatgggatttgccttgtaggaagcgctctgctggtgacccagcaagacctgggggagactggagccgtgcatggttccctggggacttgtctcattcccagcttccccagtgtgggtcttgtgctcctgggatttgtgagatgacttcttgtgaatggcatgtggacagacaatgagaaaacattattaatgttcaattaataatgaaaaagtttaaacattaataatgaaaatacttttcagtaattagggcaagtagtattggcttctcattttgggcaatgatagagatttgctttttcttataaacagagataaaaatataaattcacttaaagtaaaatatagcaaacaaaagtatagaaagtacagaggaatgtccaaaatgtctaaagcaggagccacaagtctgatttaagaaagaccattccattccctagggatgcagctggcttattagcagttagtgacatttgtcatcatgctggggataacaagaggtgacacaagtggctgcctgcatgcagggttggggagcgtgctctactaatgactgcacattcatttagcttacttagccctggaagcagcccccggagatctcacgcccatgatgaaatgctggcacaaaagtcgaataactggtccaaatgactggaaacagagggcaatgtctttgacatcaggccgacctgggtttgagacacacggctgaactccttactgagctgtgggaccatgggcaagtgacttaacctttctgattatgtttgatcaactgtaaaatgaggatagtagtcacactgacctcccagggtcgctaaaattaaattaagtgatccccaggaaagacttatctccctcctaacccacaccgagcacttggaaagtgtctgctgctgctactgtagcatcactgttactctcaccatcatcgttgtcatcgtcattgtcatctgttgtcttcattgtcaaaaacaacccttggaaagggacgcactaacacgcattatttagctgcctacagatgctcccagagaggccatctctctggtagcatgtgtgttttgggatgtggggccacctgcagtttgctatggctgggacaaccccgaggcctcatccagccctgcaggcctgggatcctgcgccagggaccctgcgccagggacatcggtcacctccacaacaccaggtcaatgttcagaagcttggccatgagcaacatccctataaacggggtataacttaacacagggacattaaatgcactggttaaaaatttgcaagccaatgtttaaaaatcaggagtgttcacagaaatccagatgtgcagtttcttttcagtcatcaaagttcaggcctccggatccctgttcccacacagccagggtcgctggagctgaacagagtctgtccctgtagatgggtgttggagtttgcaaccctttccatgaaggttaagagcctagtctttggagccaatccctgtgttactgacttaatcttctgctttgggccccagtattttgtgatagaaggagttaaagcttgaggccactgtgaggcaacgtggtcctaggtctccggtttctactgcagagctcagggggaccagctgttagatgctgtgtgtctgatgctgtctgttctcttcccacattctgcacctcagcacccaagggaactgcccacatctgggcccagtcgctctgtgttgtgggtaattccatgacagacagatgtcatctaatggcagacaaagccagatcctcaagtggcaaatgtgtcacgtgagtgctggaacctgggacctgcttctctccttgaccttggacaagttcagggaaacctcatgggggcccagaacatggtgccccgtgggtgatggtctacacctgcaggagcccctggggtgtctgcagtggtgctcattgctgtcctgaaaggtcagctgctttctcttaaaaagcaaacctcccatgagctttgctgggggtcggggagaggggtcatcaaaaagcacaaggggctgtcctgggtcactcctggcatccaggtggcaacatccaggactggagttgcagcttccccgtgccccaaccatgatgagtgtgggtgtcaggggatacatctgaatattgcaaatctctcaggaggaggacactgtcaatgattttgaccattattttccttgagcctttggtttggtgatttgggttgactttgggcttttgtgtttggggcgactttgcttttcctggttttgtttggatggtgcccgatatggtttggctgtgtccgcacccaaatctcatcttgaattgtagctcccataattcccacgtgtggtgggagggacctggtgggagatcattgaatcatgggggtggtttccccagtactgttctcatggtagtgaataagcctcatgagatctgatggttttataagggaaaaccccttttgcttcgttctcattctcttttgtctgccaccatgtaagatgtgcgtttcgccttccgccatgattgtgaggcctccccagctatatggaactatgagtccattaaacttctttttctttataaattactcagtctcaggtatgtctttatcagcagcatgaaaacggactaataagtgccacaccagcaacagagcattccctacaaagcccagaaggatccggtgttttgacacaaatgggaacagggtcctcttcagtgtttctactatgggacaggggctgagttctggccttcccacaagtgcactaattaaaaaggagagtgacactcagggagcgtgttctgtgtgcactctattatcttataacagcctcatatttttggatgagaaaacagagcccagagaggttaagtcactttcccaggccatagagcataaaaacagatcaaacccagtggcaggactgggtttgatcttcaccataacagtctacagcctaaactctagagccaaacaggagacaaacatttcttctgcttctggaatgttctggaatgtgagtctagaacaaggactgtcaaattgcaggcttcaggtcagatactgcccatgtctgtgtctgcatggctgtggagcactgctctagtgggccggtcctgggagccagggagggaggggtgcctccctccctgtgccctgctcctgtcttcctagctggtggctgcccttaaccactgcctggggcctatgctggtcccagctacccctggggcctgggctctgggcaactgctgggcaccgagtggaggaacctcatctgggagttggtgagccacctggcccacagccagctgcccaagctgagaccaaggttgtgctgggtgtacgggggtggagtacaagtgaccatggctcaccacatccatccttgggctggccacccttgaactccagaatgtcttcagtgggtggtaactggctgcaaagtgtgtcccctgccctggtagccctcttgaggcaagtggcagggcagagtttttcctcttgtttaagttcctacataatattcttgattttgcctcttagcctggaaagacaaaaatgtttactatctgcatctgaacagaaaaggtttatcagcccctgctctggaaaataagtggggattacacagaagggtgtcagtggaacatgctcagcaaagaggtaccagtaagtcatgaacttgtggcgctgtggttgagcttcaggtatttccattcctagccctgacccctgcattggggtttgtacagtgtagaagcttctggttgagactgcatttggtaagagggagcctctgctggtccagccccaagggagcggtcccccaaatgcagggaaccagtgtcttcttccactttttaaaaaattgattcagcacttgagatgttaacagatgttgcaatttcagttttgacaagattccaaaatacaacggtggctgcacactcacgtgagatgcagagggcggtgtcagagaggagagggaagatggggaggagggagggagagaggagatgctgaaaaccgtctcctgtccttagagccatcaggcaggctaaggatgtgagggttcagtgtgtggtgaggatggatgttttgggggagactttggaggagggttttggtcagcgtagctggtgtggtgagtctcatggccatcagggtgaagggtggggaacccatagtcccaccttgggcaggtggaatgaggggacctcagagacttaccctttaccctgtgccttaaggcagtggcactatgaccattgactcagtcctgggaaatccagagctcccctgtccagtgcagtagccactagccatgtgactgtttgaaataattaaaatttaagcttgtttttcactccagccgcttgtccagtgttcagtggtcatgagggtctagtggccaccatatggacaaggaagaaatgtgtccatcatctcagaaagtgctactgggtagtaccgagggtcagggtggctgcacatctactttgctgtgaaacaagggcagatgtagtttggattggctagccttccagagttctccatactaacagagactgtaatagcaacagaggccacatggcccaagctggaaatattttctacctggccctctgcagaaaaggcctgccaaaccctggtttggagaatgggtttccactggggtgggaagcattgccaggagctgggaggctggtgaggaggcccaggcagaagttctgacagctcacactgggaaacacgtgggtatttctgagaaatattttcgaagtagagttcgtgagacttgcctgtgaattagatacaaggggtgggtacagggtggagaggacaagagaaggatggcgtggggcatctggtctggctggacagctggtgggtcatggaacactgaacctggtgaaagtaggtgatatggtttcgctgtgtccccacccaaaatctcatcttgaattataatccccacaatccccataatctccacgtgtcaagggagaggccaggtggaggcaattgaatcacaggggggcagtttcctccatgctattctcacaatagtgagttctcacaagatctgatggttttataagagactcttcccccttcacttggtacatgtccttcctgccgccttgtgaagaaggtgcttacttctcctttgccttctgccatgattgtaagtttcctgaggcctccccagccatgctgaactgtgagccaattaaacctcttttctttataagttactcagtcttgggcagttatttttagcagtgtaagaagagactaatacagtagggatctgtctggattagtgccatgtccacagcttctagaatagtgcctggaacccatggttgttcaataacatttgcaagatgggttgatggttgaatgagcaagagggaagggaaggctcaggagaattttttgtggggaccaagattcaagtttggatgtgattggcctccagatggagatgccagtgtggccaactggtaacatatgagtctggagctcagagaaatggtccagggttaacagagaaatggaatcagttctgaagccaaaggagtggatgagaatgacctgtgagaaggttagacagggaagaggacctaggccttcatcctggggcagcccaggtggacattcagatgcaggaggtgggacctgccagagaggctgagcagaggtggccagagctccaggggagaaccaggagagtatgtgtcgggaagccagaggggaaagtgttaaagatggtggatggctgagtggggtggccctggctcagtgagggggccaggccttgctgggtggagatgcagtgttaaaggtcatctttcataagtttatttttcaaaggagcagataattgtaactaagctgggagtatacatgaggtcaagactgtttggtttggttttgggtagaatattttagatcttgttgggatcctgaaaagaaggataagtcagtgatgcaggccaagcgggacaacctgtcaatagctcagagggatgtggaactggcccaagtcagtgcttatctagtgaagtcttatgtggagatcagacatagaagatagatccagatgattggctggggctgacccagaagtgaggacactgaccccaggctgcccttcctccctggtatgaggacactgaccccaggctgcccttcctccctggtatgaggacactgaccccaggctgcccttcctccctggtaatgcttcctttggtggcacctctgagcagacccttggagcctggttcagacgctggccacattgtcctggaggagatgagtcagaggagtgctgagtagctctagacaaaccttccccaccatggtttcatgttggcctttccatacttgtagtgggcaggttcgggtattttatacagattattgtacagatgaggagactgagactcactaagcaaggtggaggccaaagtcactcgtctgtaaataggtcaaacgtatggaggaagggggcggatgctggatactggtgtaattgaggccgggtgagccagttccgtgacatctctgtctcccaaaagcaggactttggaaatgtgctgggtgaccagtaccctgagagcgtaacccattcacaaagaagcgttcaggaacaagaagtcctgtaaacccaaacaatcaaagcagggtgtggatgcaaggaccatattaaaggacttcagaataatagatgtgtgaatatctgaaaaggggtgggacccccccaggaagaaacttcctagaagaaaactaggcctgggctggctactgagagctcaccccatgcctggtggtcttggccaggaacttggctgccgaggaaatgggctgtgaagtgtggtgtcccaagaatgagggtgtccacttgcctgtgctgatttacacaagacagaaaactccacaaagttataactggaacctacatagagaaaatgggcatttctgtgcttacctgtggcttaacaaggacacctcacaactatttttacctagaaagcataaaatatttactttgatgttgttatcagggcaaaacttactaagtgaaacaactaatcagagttgtagactcttagacattataggttacaagtcagatgacataatgacagtctcaaagcataggagtcttaaaccctttttaacaagtaacacttttgaggacagtttaatgtaacaagaaaaataaaatgaaaacagcattttcatgtgggtatccatgcagaacaagagtatagagccagttgtaatggttgttctcagttcaggccaacttcataacacagagctgagtctgccgtctgcagctggagtatgtgttgttgagggagaacaacacatactccatctctgctttcagagattttgttctccaggcattaggagggctggcctttctgagataaggactccattgtcatgaacttaacataagaaagggctgggaatgagagtttaaaacttccaacatagccaataaaggaacggaaactaatgatagctaatgggatacaaggagcgtgcaatatttgcatctggtgtttagctggaggctctctgcaggcaggaattaggcctgttgtaacaccccctccctgaccactgtgttttcagcaccatggacagcacccaacagctcttgggtacctccagaaacagcagctgatagatgaatgaaccccataggagctaacacagtgacccaaggacaagccccagctccactaggcttttcccttagacatacagtggggagagtgttcgtgtgttcttcattgggtagttgtaaaaactgaataagatgatgtatgccaggtgccttccacaggccttagcactcaagagtgtgctgagagggcaggaagtgagggagtgctggtcccagggagaccatctctcttggatcagagggaaggaagaatagagatgctggggacagcagtttgcatttgagtcagaaatccaagaggagccccggtctgatgacctcagtttcccctgtaaagctggaggtgaagctgtgtggtgggagcaggcaaaggtgggaagctggaggtggggaagggacagaaagggcttgagcagtcatgcagagcacctgcaggaggaagctcctggccacgggtcctgcagagtgacagttcttcctgaagtggactccgtaggctcttcctcctgcaatagtaggcaagggcaggagcagacaagtggcagcttaatccccagatgaaacttttccagagagttaaatggaaaggaatccaggcaaaggacttagggactgttggtccgattgttgttgaaataatggatgatggaacccaagccaggcaaaaagagaaataagaaagggaaggattgataggttgagggaaagctggggatgggcaggctgaggggtggttgtgaaggaggtggatggagcctgaatcagcagctagaaagggagggatgagggttctgggtggcctgacccttcctccaagtcgatccttcctatcctcactcccactctaggctggcatgccagatgttagggctgctgcaaacagacaaataagaatgagagctgctggactggagggttacactgtgtcatggccacttcttgcttaaactgagaaacaatcctgtgagggactattgttaacacaatgccatgcatgagtaaatggagttttggagagatttagtaacttaaggtccaagagtaaattcagagaccacttgagcctgggtgtgtctgactccaaaacctggcatggtgaacactgctcctaggtgaggtgggagctgtggcatggacctctcatgtggaaaaaagaatggaatccctcatactattgaaatgacttccctctctccatattcctctctctgcttccgatggttctattgagagttgaacttgcaggaagtcaagtgcctgtgtgaggtcactgctctgtatgctcttcacgatcccatcccaccaaaccctcttgctttgctctcttacttccactgctgtcagaggaaacatgtttttaactctctgctttgcctttgaaccagccaagatgccttctgcatccagtggtgaagaagcagacgctggcagcctcctgcccaccaccaatgagctctcccaagccttagctggggctgactccctggacagtcctcccagacctctggagagatccgtgggccagctccccagccccccactgctgcccactccgccacccaaggcaagctccaaaaccacaaaaaatgtcacaggtgggtccacatgcatcctgcccattctatttcctttctctgccccatccatccatctatcctacattcatccacccatccatcatctatctatttattcacccattcactcatccatccatccataccttcaaccagtcttgattgggcaccaactgtgggctggttctcatcattagcttctgtgactggggctcagggcaggcccagaggagtagatcttaccaaggaaactgtggttggcaggagtagactgcctaggctccctcaagcaaacaggggagtctctttgcaggagtcaaaggggggatcttccaggacctgaatgcaagaggtgcagccagttcccaggatggggcttggctttagcttggcttggcttttctttttcttttttcttttcctttccattctgttcctttccattccattccattcctttcctttccattcctttctgttccattccattctgttctgttccattccattctttctggatgctcatgtgtctgtctttctctttgtgcttctctctgagtctcagtctctttcagtcagtctctctcccttcctccctccctctctctgctggtctctgttttgctgtttcactttccagtgagttctgtccagcaaggcagagccaggagtaaacagcagacattggtggtcagataggggtgcacagctggacagaggcccccacagtcatacacttatgtagcttttgtcacactggcagaataatcctagcaagtagagataattactttgcaagcttaggtattttttatctggaattgactgctacaaacaggacacattgatggtctcagggaaaaagtaggctgttgatcaagagataatgacttttcagagtaaagccttgcgtgctgtctttgaaggctgtgggcgtgaaacatgatgcatagcagggtttgacagttttgttacaatcacctaaccagtgattaaccaccatcaataattgccatttgctgggtaggcacgaggtgccccatttatggttgagaaaacaggctcaggaaactccagtaacttgtcccaggtcctggaaatgattgagacttttgaacccagtttttgggcccaaagcttgttgctaccacacgtgtggccaggggctggtgccctcccctctgcgatctcacctaatcctcattgtgcttcttcccagttttcatgaaagagggaactgccaccttttggaagaggtgtcagctgctgagacaaggagagcccgggcatgagctcgggagggctgggtcccagcccttggctcttttctggggaccttactgccccttatggggtgaatgttcaatctggaggggactcttgggtggaaaatgctttcagtggggcattttccttgtacacctaacacgaattaagtattccagtctaactgatgattctcagccagataccacagaaacggaggaggtgagatgcaccccacagggggcctctttagctgggactgcagatgtcctggatgggttagatgtggggctgtggtgccctgtggttccccaagtagtattggtttgtgggagaatgtgctgctgggtgggtggagggatgagtgagggggcgcccccgccaccccaccaccctgagacttggccccagctgttctccctgacagaacattctcccttcctgctttgcctggtcagtacctttgcatgcttgggaccacagctcaagctgtttctcctccaggggagccagccctgacccttgacctcatagcaccatgcgccccatcttccagcatttaccacattgccccaccttgtttagtgggttgaatggtgtcaccccaaaattcccatccacctggaacctcagaacatgaccttgtttggaataagggtctctcaactgccattaagttaaagatcaagctgagctcatgctggattcggttaggccctgaatccaatgacagtgtccatgtgacaggcaggacaggacacacagggatgggactgatgcatccacagaacgccaagaattttccgggggagaggcctgggacggcatctccctcacagcctcagaaggaaccaacgctgccagcatcttgatttcagacttctggtctccaaaactgtgagagttgttctgttgctttgggctgcccaaggagccatacacgccttgtctgttggatggtttgcctctctctaaccacctgccccccagacagtagtccctgagagacggccacacgtctgtgttcactgtcaaatccaagtgcaggcatagtacagggcatacagcaggcactcagcaagtgcagatgatggttggatggatgaatgaatgagtgaatgaatgcatgcgtgctctgaaccctgtctgtctgctttctgcatctttctacatctctgtagatgaatccaaatattcagtctttatgcaacatggccacataaattacagtacaaagtttgaggcaaaactgtgctactttgcattttgttattgtctttgtgatagctccctttttcctccattgaaacctaaaaccatttaaagtccattcaattagccaccatccacctcattttattctggcgaatgtataatttgttcctggccctcaataacttggtaacccagagagtttcctgcctctcccaagcttgggaaggtcgagcctcagatggcacaggtcttcattctgactccacacgccctaaattctggcgttctgtccccagtctgcggacacttctggcttccgccctgccctcagttgcaaggacatcaggggatactctgacacttatgcgtttccatagggactgaattgagactgggaggtggaggagggtagttccgagctatgggtcctggcctggcttcttcctgcacagactacattttggtgactttgatttaattttctcagttcctctttttccttttcctttgggaaaaggttcatgtgcttcagcatgtgaacactagatggtagcaaagaagaaagtctccttacctgggcttcccttgctgcaggagggaccctggcccaactgagtctccacccaaggcaggactgcaggtgtcttagttcatctgagtgacttataaaccacagaaatttattcgtcactcttctagaggctggaagtccaagatcagggtgccggcagatttggtgtctctgatgagggcttgcttcctggttcataggccaaattcctggactttcttgaaaagtcttcatctctgatcaccctctgagtcactacaggcccattaaggtgggcaggttctcctctgtgtgctgtggtccccaccctgcccccatggagaaattgcaggaggtcctttgcattcctgggtttcacctgcctggtccctggagatgcgtttacccctctcccttttacctctcctttacccctgctgtcacctggtccagttggtaacgctcaactctgcgggatgggagtcccacagcctctgccaagtgtaagtggagctgggtgcgatgtgctgttctcagcccccaccttttcctggcagcctgcccctgaggtggcttctgaacctcagcttcctcatctgtgaaatgggggtgacaagtggtcccctgcacaagctgggtggggcgagccaggcaaagctctatgggggccgtgggggcagtgctggttgtcacatctgtgattgacagtggggcagagacctgggtgggatcccagctccaccaagctgagcgagagcaggcaaaccacgctgcctcagtttccctatttgtacaagagggctagtgattccttcctcatggggctggggtgagaagtagaggcaatgatggttagagacagaggggctgggggatgctgcgtgtcacctgcgtgtgctcaggagtggggcactgtcctgagcaggagcagcctggggaggctgaggccagtggggagaggacagcgcagtgtgcagaagctggggatgggtctccctgcagcccctgccctgcctggccacttcttgcatggctggctccttgtcatttctcaggtctcagctcaaagtttccctctgcagagcagcctttcctgacctccctctcccaaaccagctaccacctccccccgaccagcccagtactctcagcccacctgcgtggtgccctctcgcccccctccctccaccactctctctcccagcccttttctctccctctccttctgtctccttctctattctacaatcatctgctctctttctgtctgcctggcctctgtctgtctccaccagctgacggcagggcctggcccgtttccctgtggcctggccttgtgtggccaagcaggtgcttgtagagaaagcgaaataactaaagtcctccacgaggtttacagtttccttttgggttttgaggaatactttttattgatgctgtccacatcccaggattgtattggaagtttgtttctggtttttagggaatggggtagtttagatctggttgttttgctggtgggattaaagggatctggtgtttgcaccagtcctgccaggacgcttttggaatgagagtttgtgctgaacacctaagagcttctgggcctgtgccagctgctaggctcctgaaaaggagctgatggtctcattttacaggcaagtaggctaagcctttgagagcttcagtgacttgcccagagtcttgcatactgggaaatggcagatcaagaccagaggccaaatctgcagaagacaaagcccatgctctctgctcttccgggcacctgacaccctgctggcccggagcacatgcaggagactgtcattgatggaaggagggggtgtcccactcatttagacttgaatgagcaaagcctgtttagaatcatcttcaaagtcatttcatgtacacaagtgtttattgcccgtgttttaagtgccaggcctggggaaactgtaggaaggaaggtggacacaggcctgcccaggagcaagaaacagactgggcagcgtgattcactccaagtaagaggaaaagtgtcagggcaggctcaggtcccaggggacaggagacgagggatctgatcatggcctctctaaggaaatggtattctagcagaggagcggggaagcatttcaggcagaaagaacagcccatgcaaagactcaggttggacggagtgtggtgccttcaaagacgggagagatcttcacatgctggagtgaagagagtgaggtggagatgcagctagggagccgagtggggccacccccaggggccttgagactgggccatgagttcgaatcatgtcctaaggaagatgggagagtgatccaattcaccttctggggtgatcctcctggcagagatacagggagagggttggagcccagaaatttattccttactgttctgggggctggaagtgcaagcccaaggtgctggaacagatgctgtggggagggcagagcggaccatggtgctcatccaggctgaagggtggctgcacagattcttccgggtttcccaagaacaagaagcagcttcaggaagctgaattcatagcagagaagcaggaaggaggcttttctaagcccagcgccctgcagggaggatgctggtgctggtgtctgcaaggcttggcccctaacagggtttgccctacagatggagcagaactggacagagatgcaccctggcctctagctttgggagcagggatcccggtccagcatcttggcattagttggggcccctcctggaggtgcaggggagcgtcctttccgctcatggtccccagtctcagcaaaacccttggtcccagctcctgaagacctatgttcttgctgcttcctcccacaccccaggccaagccacactcttccaagcctccagcatgaagagtgccgacccttccctccggggccagctctccacacccacggggtctccgcatctcaccacggtccaccggcctcttcccccaagccgcgtcattgaggagctgcacagggcgctggccacgaagcaccgccaggacaggtgaggccctgccccatgagggagacctgtgctgccagaatccctgcctggccagcctcaggctgtgcagctcatgccacgcccagggccttggctgggtgtcccgttctacagtcactttctgaacaaggaagtcacattttcattttgcacctcgctctgcagattgcatagctgatcttggttcccacattctgggacggggtgcacagtgaatgtgcactatgggaacctggccacaaagtcctgtgcgtgagcccctcaggacccagggtggggtgggagctttgcaggagagactgacttagagaaaagtggccgttccactttgtcccaggacactgagggcttcatagttgtcactgggcaagagtgtaaggcagcctgtgcctgcagcttactcttattttggatcacatgtgtctcatggactgtgaaagattagaggtaaaataggtaataggagacagtatgggttggaggaatattagacaaacaaaatgtccttctcagtttttgtgaagtcctcgccctgaacattgattgcatgtattttggcaggttttattacttgcatgttctgtgcttttcaaaacagcatgttgtaaacagccatttgccttgaactcaaatcctcatgctccttctggtgtgtccaggataaaaaccaagaggtcacatgcattttggggctgcctctgtgatattcattataagctccaaagtcaatcgtgctgggtttctgggtgaagggggtgacctataacctgaaccatctttctggtttagttttcaaggaagagaaagtaaagggtctccaaagaagcggctggatgtccgtctgtcgagaacgtccagcgtggagcggggcaaggagagggaggaggcttggagctttgacggggcattggagaacaagcgaactgccgctaaggaatctgaggagaacaaggagaacctgatcataaattctgaactcaaagacgacttgcttttgtatcaggacgaggaggcgctgaacgactccattatttctggtgaggaaaggatggcccattaagtgtggggatctcggccagaggtctagtgtcaccagggggtcgaggacagagctcgtgcctgggggaggaacaggtcgaggggctgcacctggggagaaacaagaggggggctgtgtcctctggaaatgagcttctcctgaaacaagctggggtgggggtgcacagccaggcttagagcaaggaactagaaaataccccggtgaaattgttttgagagttgcatattagttttcatgtgtatgtgaaaaaaaaaaacaacataaaagtggtgaagcaagtgacttagagaatgccacccctgaggatgctgtggcgaacagtatatagttggtgtacagatgctcagtgtacagaagttatagcaaaaacaaaaacaaaaaaaaactgtaacaagtaaagcaggacgagatggaagcagggggagagggaggaagagagattgctctattgatctcaaatggccgtctcagaagtgctgtggatgggacaggcagcatacgcttgtttgggagcagatgctcacagggtccttggaagccagctccgtatttgtcctcatggtgcgttctcccatgaggtaattgctccatcctacccttgaggactccggggctcgggacgatagaggcctgcagaccaccctgtgatgaagggagaaggaggctcaggccaggaggaggaagtgctgagggggtttccctcccagctggtactggctgtgcggggccctctgattagtcccaggaaggtccagggcggccgtggtgtttggcctgcaagggaaggatcaggaagcgtccgttgctgttcttcctggaagcatctcatggtgactgttgcgggcatgggcaaagctcaggccacgtctccctgggtgtctgtggggagcaggaaagggcatcagatgtcggtgctgaccctggctggtactgaaggcatgcggtgggtactgtgatgggtggatagaccggcagcccagggctccatagcctcccgcttcctgctgctttggagcctttccaccgggtccgaggaagcaattctgagtatgtggctgcacaacatgaaaggggtgggggtgctgtcacctgtgcgtttggaggaggctgactgccaccgcggaaccagtgtctttgtggcagaaactaggagctggtcactggcctgagggcaccaacctctctgaagaggctggagcctgtggtgttcccaaactcgttaggccctggaatccttgcccttaaacacctgtgagcctccagcaggagggtgctatgagggtgcacttctgagtagagctggtgttgggatggtcaagggctagagcacggtccctcagcctcagcgctggtggcaagaggccaggcgattctctgctggggagggggctgtcctggacacattaggatatcctgcagcatccctggcctctccacactggattcccccagtgaagacaatctaaaatgtctccagacttggccagatgcccctgaggggcagaatcacccccagctgagaatcactggcatagtctgtgcccttggtttgggggtgcccttccataagtcccttatccactccaggacacaatgctttcattggtgaagagggagatgggaactgcttcctcttgacattgacaatgtcagcagccagggccccttaccgggtgtttcttgtgtccgggatgctggtctaaggttgtgacaagaaaggttttatcctcacaggagccccatgaggctatgacatcatagtccttattttacagatgtgtaaactgaggcatagggaggccatgtaactggccatggtcatgcagctcgttggtgccaggctgggacttgaacccaggctgccagcgccagctttccgctctgtgctagaccctctctgaggatgagtggattaatccatgtcagcccttggcacagggcctggctcagggtgcacctcggagagcacttcttcctgtcctcaccagccacacggggaggatagcccctggggaggacagcccctggggaggagagcctctggcccagaagggtctcccggcttgactttcctttagggcattgttaggccatccagatgcagtgtcctcacgcctggcgttaaaggtataatgcagtcattttatttaaacacagaagaggatgggaatctgcatttcacctctcgggagcctcaggcctggcccggatatgacctcaaaaccctctgtggcagcgtggttgagccagcagcgtggttgagacacagagtttctgcactggagacggcatcaaagcacatctagcagcacccttggctcccacctctgtccctcccgcccagtgccttccttctctgattgagtgctctgcacagggacgcctcctgctcagccaggtggcctggtcacagccagctgtgttagcctcttgtggctgttgtaacaccttatcatctgctgggtgacttatgaccacagaatttactcttctgcagttctagaagctagaaatccaaaatcaaagtgtgggtagggtcgtgctccctgcgagtgctccaaggaggagccattctcttccagtttctggtggttcctgcattcttggcctgagaatcccagccctgcctccgtgggcacatagctgcctcctctccctccttcctctccccttcatatgaggatagtagtattgcaggcagggcccatctggataatcctggatgatctcctcatctagagattaacttaattacttctgcaaagatccgatttccaaataaggtcactttcacaggttctggggatttggacttggcacatcttttagagaaccccctttcaaccccctgattccactcctcttggttaactcgttcctcttctcattgagctaaagctaggctctgggatttgacccacaaagtcccctccatccctgagatctctgtggctgggccggtccatggcctccaacagaatgtgctgtgaagcttggacttggccctgggcaggtccctcccctgtccctgccccatttccttgttgtcagacgaaggccctcattgttggcttctatgacaacactgaaccttccttcctagctgggacacagttgcagattcacactaattcttgtcattctctattctctgtctctttgctacctatcaattacttattgttgactgtctaattttgtctgtatgagggatcatgctggtatctgtctgtgtcccgtggtgtgtccatcatcccagggtacctggttctaagagtcagtaagcacctgttggttgtgtggctttaaacacatctgtgaccctgatgaatctgatttgtccctccagccgatggcccctgagctccagggtgtctctgtggactctacgcatgcgtccacgtggggactggtgtgcattgcatagcttacatctccagatctcggttcccatctgcgccctgtgctgggactcttctccatttcaatcaatacatctaagcctcctgtgaagcttttggctttgtgctgatgtccggatgaccctgaagtcctctctgttccccttggagcagttcgcgggtccagccaactccctcttctctggcaatggtttgctgtgctctcctgcctggacttggcctccaggcggtctctctgtgccaccattgccccatttctagttcattctccacacaggtggccacaggaccagggtctcatagaagttggataatgtcacctcttgctcaaatccctccagtggctccctgaggcactgaatgccacatcctccctagtgcctgtggccccaccccatgtggcctgcctccctctcccggctcgcctctcccttggacccagcccatgggcctctttgatggtcctcacaccccaaccacagcccctgagactcttgctgtccctggaggtgtgcaaggctccaccgcgtttaaaacatcgctcagtgcaggaagccacctggccgctgtgtggcaacacttggccccttcttctcacccaaccttatttcccctacggcagcgtccctgacgccaataccattggctttgcccatgcagcctctctaccagcacatgggctccgcgagaccaagtcttcgcctctgtagttcttactgtgcgcacagctcacgagtgctaagtgcaaaataaatatcagttacatgaatgagccagaatgggccaatgggggattagagaagccagtgcctgtaaagtactaacaggtgccaggtccagggagccctcatccctggactgtttctcccatggcgtggctcagacctgagcctcttgttatttgttctcgaaacccagtgtctgtaagtgaacacggattttgagctggggtctgagagtgggggaaggtagcactcattgtagaaactcattctggaaactgctgtcgtgaacgtggcccaggcccaccgctgtctgcaccgtgcaatgtgttacatggggtgtcatctgcaagccctgggtgaggccccctttcctccatgggccttttgtgggccaaggtcaggattcctgtctgaccctgagaaactccttgttgagggctgggctcattgcacaaactggcaggtatgtctgaggtgcaacctccagccatttgcaaattgaggcttctgtgtgctggtcccagggtatagagtctagggtccctgaagccctgaaatcaagtgcagaaagcagtgctttgcttttgtcacattctcaactgtgtccccaatgctccagaagtgatagatctctgagataaaatgctgtgggaaaattcaatattggtcatacagaaagtatataaatgttgctttttggggggaaaattactcacagtaggaaaggcctgtaagagtattttgctttgcctggtgcagacaatggtgaataatggttgttatttgcttctctctgcagtgtgttgagttcaaaccccattcccactgtctcgcctgatacattgttttcacatctccatggggtgaaagcagaaagcaccaggcagcaaattaatcaattattaatcgcaacaactactattttattcatttattcatttattctccctctctccctctctttcccctgttgagggaggtttggcagacgttgtcttatcccatgtgaaaaagaaaatttttgttatcaaacgtttttgtgaacttcagttctctattagaatggagaatgcatctgcatgagaatttaatttttggaaatggtggaggccctatgcccacatgcacatgcgtgcccacacacacaggcttgcacatggggtgccttcgtgggtatgcctggtcagcggtgggtgagcagggccttgcgctcattctccagtcatcaaaagcgaattttatgagaaacagtctttgtgttgtcactgccccaagatttaagttttaaaacctgtcaagaaaaagatgtttgtgttttgtcttttctctgtgctgaacccaagagtcatgaccacacctgtctggtttttcacagtgtcccagctctgggcgcagtagaaacacgtgatgagggggagcgagggactgaggggctgctatgggaatccgggctgcaagggaagaacctactgatggaaggaagctgacttctccagagccccccagctgcctgtgctgctgctcctcctgcagacagcttctcccaggtgctcatgacagcaaggctgcaggctaggactcaccactgtgtctcacctgggcccatgtaaggacagcacaggccctccacttcatccatgctgtagtcttagtccctttgagctgtcataacaaaatccctagactgggtgtcttataaacaacagaaattcattcctcacagttccagagacagggaagtccaagatcaaggttctgacacgtggggtttggcaaggccccactttctcataggtggtgccttctatgtgtcctcacatggcagaaggggccacagagctctctaaggcccctttcctaagggtaccaatcccattggtgagggttccacctaatgatctaatcaccttccaagaccctaccccccgaataccatcacattggggttaggcttcaacataggaattttgggggacacaaacatctggcccctggcattgggaatgtcacagggagggctgtctgtgcagctgggtgggcctccgtctctggggcttactctgcgtagagagacttgctgcaggatttgaccaccccacgtgcctcgacatgtttctttctagctctgtgaccttggaaaagtttcttaacctctctgtgcttcagttctatcccttgtaaatgggggtgacaagaaagttcttatgaaggtcaacaggggtgctcaccgaagtatagctttgtctcattgtgctcagtgagcgttctggttgccgtggtaatcagcactgtcaccctcatcatcactgtggttaaggagcatataggaacaaggaagcactgggcatccaccgctcatcaaaatactgcctcacaggcatgaagcaaagtttagctcccagtttgtcaatgttccgtagctgatttgtgctattcctcattcctcggccaattcatcagtgagagtgttgatgtccctgccgctgcataggtacatctgttctccatccagacatgcagttacatgtgtttgtgtaactggctgtggttttgcttgcctgcttagcaagggacaagggcaaggggaattaatcaccggggtctatgtgccaggacaggctggcggggacctttgggttggtcaggagaaacaagcctcaagaaggcctctcgatggcacctgccatgagccacccgtcccagaccaggttgggtaacccacggcgcccagcctcagattactctgcccattgggatgaccctgggcaggtggtggcacatctgggccctggctgcctttcggtagctcacaggtgatgtcagtgacccccttgtcaggttgtcctgggggcggatgagacaacgctcatggagggcctggcctgtgtgggcacatggcgctcacgtggtagccctgctgccaaggttttctgagggtgtgtcccagcggcaaaagaaaaaaatctgatatttgtacattatttatttataaactatacattaggggtaccatgctaatatactgtgtactttataaaatatacatgcaagatagtaataaaaggtgacccgagagagtgactatgtacatattaatatgttctagcacagcctgccccactgtgtcctaggagtaaggccctaggaagtatatttcagcaagcacaggggggttctagtgctggtgcaggagtgaaagagtaaatcctagcccccacaatcccatgagtcaattccagtcagctaggcggtacaagagtaaagggacatacgggatttcccggctttatagattttttttaaagcttcttaagacacacccttgctatgtattcagcaagtactatatgtcccaatctaggcctcaaggattctaaggagaaactagacacagtctccaaccctctaggagctcatgactgaccttaaaagctgatgttcaccataaactcaacaacgcaaaagagggctgggtcgggagttgaaaggtgtattagtccgttttcacactgctgataaaaacatacctgagactgggtaatttataaggaaaaagaggtggttgtttttttcattttgttttgctttgttttttgttttgttttttctaagacagagtcttgctctgttgcccaggctggagtatcgtggcacgatcttggctcactgcaacctccacctccggagttcaaacaattctcctgccccagcctcccaagtagctgggattacaggtgcataccaccatgcctggctaatttttgtatttttagtagaggcagagtttcaccatgttggccaggctggtctggaactcctgacctcaggtgatccacccacctcggcctctcaaagtgctgggattacaggtgtgagccaccacacccagccagaaaaagaggtttaatggacttacagttgcacctgcctggggaggcctcacaatcatggtggcaggcaagagagaatgagaaccacgcaaaaggagttttccctcataaaaccaccagatctcatgagacttattcactaccacgagaaaagtatgggggaaaccacccccatgattcaattatctcccattgggtccctcccacaacacttgggaattatgggagctacaattcaagatgagatttgggtggggacacagccaaaccatatcaaaatcctaagacaaatgtgtgacgccaagaatgtggtgacacgggcatttgatgacatggagaacgttacacggagagaggcaacactcaggcagttcctggtactgtctaaatgtaaagaaagccttctttgcaggctccgggatcctttccccagtagacatacttgtaaaaagtgaatgctaacgtgttatttgaatgccattttaagtgtggggagggtgtactgaaaggcttcgtgcagtgtatgcttctgtaaagtgaagagccacctgcagcgagtgaggactcccccacagtcgtctccatggtgacttcacagaacagcaggcagcccctgccttttcttgaaagttggggctagagatttgaaaggctgtggaaacccagccactccctgcactgacaccagatggcgctggagatgctcgctgggatgcaggatgcttgtgagaacctggtctcaggacgacctggtgggcgtcttgcagcggaggcaggtctggcccagggtggttctggctgagcaccaagcagcagagctctcagagtgggaacgcacagccccagtgacaatcagctgaaacagggctgccccccgccccgccccaccccggcccttttttttgtttgagctattatttcccatcaagtaccttgataagcacttttcatgcattttattgcctaagtcccttgacaaggtgataagacagctgctattaccgctttttttgtttgtttgtttgttaacagtagaggaaaatgaggcaaagagaggggatgaaacttgcccattttgaatccagggctttccagctccacagcacatgactgtagcctactgttcgtccaatgcgtaagcacatcataggtgccaggcactgccctgggtgctgtggacacagtgatacaagccagggtcccagcccgcaggtgcctgcagcaagggggaggcaggagcccccaggaggtgatttcaagattggggcatgagcaccagatggacacaggcaaagagtactctgtgatttgtgcatctgaaagcagctgttctgggccagccgtgtgctcttaaaagcattggtaggaactgtatccgtctccctggggcctgggcctctgcactttgcaggctccgcaagggtgaaggtcaatcttgtgtgtcctcttggctgagctgttccacccagctattgaaatgctagtctgcatgttgctgtgaaggtattttgtagatgtggttgtcacctgcagtcggtgactttaaggggctttgagtggccctctccagtcagttaaaggtttgagaataaattggagtttcccagagaagaggaaatcttgcctcaagactgcggaatccactccagccgctggcctgccctccaaatccaggactgtacagcccccgcaatcgcatgagtcaattccttaaaataaatgtcttaaaacacacacatatgcacatatatgtgtgtgtgtggatgtatatatatatatatgtgtatatatagaatgtgtatgtacaaacatgtatgtgtatgcatatgtatatgtgtgtgtggtgtgtgtctatcccattgcttctgtgtctctggagagccctgacccaaacaccaggtgactctcaagagctgccagggtggagaaccaaagctttaaaatgaggagtcctggtcatcaaggtaaaggctttccacatagggacagcttgagcctgggcgtggagatgagacgcgtgaggtgcacagggtagcgtggttgttgcatagcccagtgtgagacctagggactggccagggagagagacctttattcaccctgtaaagaaagctggaattcaaaagacaccaaagtgtgaagcctctgagggttgtcccaagtcactcacctcctggctatgtggccttgggctacactgtgggacgttgtcatctgcaaaataggaaaactaaatcctagcacctgccttatagggctgcggggagatgacatgggaaacgcattcaaaggctgcctctgggcctggcataccgcaagggctcattcaatcttggctgctcttgctgccactggtgggaagcagtgtgggatctcctgcagctgaactgatctttctggagtgcagacctgatgccgtctgtcatgattcaagccttggaaagggccccaggactttccgagggtgggagggtgggctccagagaaaagacagggaggggccatgaggaggctcaggcaggaggggatggggtctgcagggagtgtcagagtcagctccagctgccgtaacaggataccacagagtggatgcctgaaacgacagacgtttgttttcttaccattctggaggctgaaagtccaagaacaaggtgatttccagtgaggcctctctctgtgtctttatagggccgttcccctgtgtgctggttggtgagagtgggtgatgagtactctggcctctgtttcctctacagggacaccagttccatcagatcagggccccgctcttgcaacctcctttaaccttagttacctccttacaggccctacccacaaatacagtcacattgtgggtcaaagcttcaacttgtgaattctggggcagagcggtggtacacaggtgaatcataatgtgggagactgaggcagagaggagaaactggcaggagctggggagtggggatggtgctgctggactccattcttgcagctgtgggcccctggctgcaagagaaagcgcagaggggaggaagcgggagatgattcgccagcgacctgagttgactagagaggggccctgcccagctccacgctgacagggaccatatagtcagtcaagagcgtttattgagcacctcctgcatgcactgtgaggaaagccaagtcacatccacagaggaaggccgtggtcagcagcaccagcatctgtccagtgggtgtgtccctggcatgttgcaccagcacagcgtgtgaggtccgatccttaaagctgcttcattttgttttccagcagccctctgcatcccctgcttctgcatcccctacttcattttgttttccaacggccctctgcatcccctgcttctggttttccaacggccctctgcctcccctgcatccccaggtagcactagacttttctgtttatttgcaggtagtgaactgccactgagtctgagtcgtaaacactgtttggattcagaggtcagaatatccttcccctgtgatgctcaaacttctgagtcagttcggtgttttgccagctccctcctcaactgagcccctctgtggcaggaggcctggggctgggatcctcccctttgccctgctcattccccagcttctgcgtgtgtgcccccagggagtgcaggctagcctggtgtctgggggccttggctgggctctgagctctgtgtggccattcagtttgcccacttgggtcccagtctgtggggctggcacctgctggaggttcaatttcccttcaaaaaaggtcatggtgatccctctgagaattactttgagaacctgacaactcaatgatgtgagattgcctactccaaggcccttctgtgggggacagcgagggctgctgtggcctcctgctcctctctctttaagatgagcaggtccatccacagcagcccagggagcagccctgggggcagagccatcaaggacctggtggagccatcctgaaacttcaacaggtcagggtggccattgtgcgcggcatggcacttagcacagctgagcagttaaaggggtatatggagggccctctgtgcagttgacaggtgtctgtggagcactctctgtgccattgacgggtgtccatggagcgctgtctgtgcagctgacaggtctccacagagcactctctgtgcagttgacgggtgtccatggagctctttctgtgcagttgacagatgtccgtggagctctctctgtgcagttgacaggtgtttacagaagtctttttctgtgcagttgacgggtgtccatggagcgctctctgtgtagttaacaggtatttacagaagtctctttctgtgctgcttgtagaagtcctcaacaatggtgatcttcactaatcactatttttttttcaggaagtatgcaggacttttgcaatccaacgtgcgtgtgttattttaaatttcatggctatggtggcagtggtgtcagagtaagggaaatcatgcagagtggaagcaagaggaaaccctgtcacttgtgccctattctgttgcaaaaccatgtcccagtgctggcctagacacacggggtaggaaaatagacaccacgtttttgtaggaagattggagaatagtggtctccttgcacttgacctgctgtgaagagttgatgttaacttcttggtgagtatgtaaattacatccatgggcacaggcgttctcgcagaggatgccccatccaggcctgtgatgcaactgcagtgccctggcaagtgcactggcttccggggctgggctggggagggcactgagctgagatccagaggaggagcagaggtgggagggtctcacaggctcagaagctccagggtggaaggaagcccagcctttgagggacgaaagggaagaagacaggcagagatcattctggagaagccagtaggggagtggccatgtgcagccttgtctactatgccagtgatctcactctttatataaagaaaatgcacaagagatatagggacatctttgtggctgttgttctgccaacaaccgtggcacacacaaaaaccctcacagcaggagcccaggaggagaagagagtccccattccactccttagacagcccctctggccaggagctggagaggagagtttccagtgccattccttagtcaggcgccctgggctagagctcaggctttcagacagagcctgacttttccacacccacttcctactggtttacagctactgtataaagcaaagcaccctcactttcctctttgtgacaggtagtgatgctttttacagaaactagactttatagaagcctggaggtgtggaatggtagagatccacaggactctgtagtgaacatgcaacaccagctcccatctgaaatacacacccacagatgcatttttccgttttattttatttcttccataagttattggggtacaggtggtatttgcttatgtgagtaagttatttgtgagatccttgtgcactcatcacccaagcagtaaacactgcaccatatttgtttgtcttttatcctttgcccccctcccactcttctccccaagaccccaatgtccattgtatcattcttatgcctttgcattctcatagcttagctcccacacataagtgagaacatacgatgtttggttttccattcctgagttacttcacttagaataatagcctccaatctcatccacgtcatcgtacagatgcgtttttctctagagaaagttcatcagcccagaaggcctgcctgggcgcttccctttcagactgagggatagtgacacttcccttaccctcaggcacccattgcagggtctggatgccccccacgcctggcagcccctcctcccccattgttggctccctcctctcattaacctccaaccctgctctctccctggctcccaggacaccatccctgcctttcttcctgccatcctggcccctcttccctgacccgcccctaaaggtgagcaggcccaagcttcctggctccttcctttgctggctctgtgctctctcttgaggctcaacctcacatctgtccccatatgtggatcgtcacaaatctccatccctggctccagctctttctgatgctaaaacctcacatgtccatttgtccactgtccctgcagaggccctgatgcaccctgagttcagcagagccaaagctaaccttgtcctctttcccgggaaacccgctcaacttcccagatcctcatactcagctaatgtcatctccatgtttccacatcaaagcccaggcagtcccctcctccaacatcacagccccactcattcagaaaagatgtgccatgatgtatgtgtcaggcatggcagggagagtttgccctcaagacccccagagtctggtgtcggcatctataacagtgtcactgttgtttcagaaaacgtcaggcacttctgcctctggccatgatgaagcgatggtagctgccctcccactaaaatcaaacgagagactggacaaaatgaatgagaggactgtttcgaggcattgaacagaaacagtacatgcctgttatccttgagagagtggagacccctgggttagcccataattgatctccctggtttctgggggaggcatcttcctgcagggtgcagggaggtggcctctgagcagagtggtgatctcaccgagatgaggaggcagagactggagtctgggctactgaaacagctggagtttgtaggacaggaaggagctatgtaacgggttctgtgcagatccagttggccatagcctgggctatgcctatatgcagaattctacagacttagcagagattgcctgtgagcatgacagctgaaggtcagggggtgctaggagatgttgggagttcagctcaaacagaatgaagagatcttgatgaatgcaacagacttgaaatcccacaaagaccaagacttaggagtaaggggcataccttaaggctttgttcaaaaccaaaatggacctgcagttattataaatatgttagaggtcttagagtgtcaacaaaatgatcacaatgaatgaccagatggagaatcttagcagagaaacagaaacaaaaagaaaaccaaatggaagttctagaattaaaaggtacaatatctgaaaatgtcactgcttgtgcaaaacagactccaggactgttctcacacaggggcttataaagccaggacataggccaggctgggaggagttggggaatccctgccaccctcctctttcctgggattcattactccctctacccaaatgccaaagcctcatgcacatcaattcatgcagcctgaacccagcaggatccacgactgccaatcctggcttgcagtttgtgctgggaaatggctgcattagcaacgtggagacatacttccttgtaactaagactttgtgcatctctgtaattatgtccttaggataaattccaacatgcaggctaattgagaaaaagatatctcatcatgagtttattttaactccaaagcctctttgccttatgttcttatttatatacatttcctttttttctcttttttaaaatttaactttaaagttcaggggtacatgtgcaggtttgttatatagataaacttgtgtcatgagggtttgttgtacagattatttcgtcacccaggtattaatcttagtacccattagttagttttcctgatcctctcccttctcccaccacattggcatcctttttcttctctagagagtatctgagactggttctaaaagcagtagccagcccggtgatacagggagaaatagccaaaagagctcctgccaaaacctacagtaatcagaaactttgactcaggaattctcccctttctagggatcaagctgatggaaatattcatatgcatgcagagaaatgcaggaatgaggacattttctgcggctttggttagaagtagaaaaacaaacactaacctaagtgtccattcatggtgagctggaccaataaatgatgggattatgtgatgttcacactgtggggttattaacagctattgaaagagctggattaaaacaccctgctttggaaccaggaccagctgtggtgtggaggaaacagcatattgcaaagtagtgtgtatggtatgatcctacttttgtaagacatcagaattaagtgggagtctgtaaattgttaattgtgtagaagtaggtctggaagtagatactgcaaaatgttagcagtcgctttttttagaggtgagatgtgggcagagaaaggaatactatctttccttaatactattaggcttaagttgtttgcaacgagcatacattatttttgtagctgaggaagagaacatagttctttgagctttgctgggaggcagtcagctctctggtctcagctatgacctgggacaactcatatctccatgaactttggtgttcttttcattaattcaccagggaggtgagggtagaaggagagcctggtgagcacctttcagctccaccatggtatgaatgtttgtctcctccaaaactcatgttgaaatttaattgccattataacagtattaagaggtgggacttctaaaaggtgattgggccatgagagctccgccatcatggatgggattaatgctggtataaaagagtctgtctggccctctctcagcctctctttgcccttctgttatgttatgacataacaagaaggccccttgttatgctggtaccttgctgttggacttcccagcctccaaaactgtgagccaataaatttctgttcaatgtaaattacccagtcttgggtattctgttatagcagcatgaaacaaactaagatgggctctaattctgatggtcagagcaagctccctggtaggttgaagggtggctctgactgggactccccattgggaagcaaatcaccctacagccttgtcctctgggaagtcctgacctcaaggagcactgcccagaggagtggctagagggtcactctggagaagcatgtgagcacttttcttttttctttttttttttttaactgaagttttagggtacatgtgcacagtgctggtttgttacatatgtgtacatgtgccatgttggtgtgctgcacccattaactcgtcatttacattaggcatatcttctaatgctatccctcccccaccccccaccccacaacaggccccggtgtgtgatggtcctgttcctgtgtccatgtgttctcattgtttcatactgattgtatttctatttatttttgcaaacaggtggtatactcagtatacattgctcaaaggagccccagtgctactggtttcttatctgtcccattggggctgttttatgcttatacaagcgaagatacattaatatatgttaagcttttccatcttggagattaggtatcagggagaagactgatgtgagatctgcctcctcttctttgtccctttcctgtctccccactcacctaggaatagaagggaggattctgacgactagtcttagagccaggcacctctcttcactctagagagggcagctcttcctgggatcaaagtgccatgtgtggtcttcttggagtggggctatcaggaacagctgggaacaaatgaggggccttggaagcatcaaccaggtctcatctgttgatggacatatgggttgtttttagttattacaaataaatctgtgatcagcatttgtgtacaagtctttgtgtggacatatgctttcacttatcttggataaatagctagaagtggaatggctgagtcatgtggtaggtttttaactttttaataaccggaaaaatgtgaagtgatcctgccatttagagtggtcctctgatatattctcaccatcaaggtattagagtttcagttcctccacatcctctccaatacttgatgtggtcagtctttttaatttcatgtaaagaactctgtgcagatccagttggccaagggctgggctatgcctatatgcagaattccacagacttagcagagagttagaatttaatttttaattctagtgggtgtgttgtggtgtcttattatggttttaatttgcattttttctaataattaatgatgttgagcattttttcatatacttatcaccatatctttgttgggaaaatatctattaaaatcttcccatttttcaaaattaggtcaattgatttttatgtttgagagtttcattggtctgtgtgtctgtttttatgctgctttagttattataccaaaatattgtttggtaccatgctgttttggttactatagctttgtagtatatctatttattttattttatttttttagagacagggtctcactctgttgtccaggctggagtgcagtggtataaccacagctcactgaagccttgacctcttgggctcaagtgatcctcaaacattggctttctgagtagccgagactatagacatgtaccaccacacccagttaatttttgtattttttttttgtagagacgaggtctcactatgttttccagggtgctcttgaactcttgagctcaagcatttctcccaccttggcctctcaaagtgttgggattacaggtgtgagcccctgcacccagcctatagtagtatatcttgaagtcaggtagtgttgtgcctccagcttcgttcttgctcaagattgctgtaaatattcagtgtcttttgtggctccataccaattttagattcattgttttcctatttttatgaataatgtcattggtattttgataaagattgcattgaatctgtgtatcactttggataatatgggcattttagcaatgtttattcttcccagccatggacaaaggatattttttcatttatttgtgtcatcttcaatttctttcaatgattcataattttcagaatacagatctttcatctccttggttatatttattcccattttacttttttgtagctattgtgaatgggattattttcttgatttctttttcagatagtttgctattgctgtacagaaacagtagggatttttgtatgttgatttttgtatcctgcaactttatggaatttgtttattttaacagttttttggtgaggtctttagggttttctatatagaagttcatgtcatctgcagacaggaacaatttagcttttcctttctaatttggatgccttttttttttctgtagcctaattgctctggctaggacttctagtattttgttgaatgaaagtagtaaaagtgggcatccttagctgggcatggtggctcatgcctgtaatcccagcactttgggagggtgagacaggtggattacttgaggataaagagttcaagaccagcctggccaacacaaagaaacctcatttctactaaaaatacaaaaaattagccaggtgtgctggtgcatacctgtaatcccagctactcgggaggctgaggcaggaggatcacttgaacctgggaggccgaggttgcagtgagccaagattgtgccactgcactccagcctgggcaacagaacaagactccatctcaaaaaaaaaaaaaaaaaaaagagtggtcatccttgtcttgtttcagatcctggaggaaagactttcaattttcctccttcaaaatgatgttaactatggatttgtcatatatggcctttattatattgagttacaattcttctaaactgacttcattaagaggttttattatgaagtgatgttgaattttgtcaaatgctttttctgcatctatgatttaacatattaatttttacatattgaaccatgcttgcatccctgggataaattccacctgatcatgttgaaggatctttttaaatgtgttgttgaatctagtttgctattattttgttgaggatttttatatctatgttcatcagggatgctggcctatagttttctttttttgtgtccttatctggtcttagtaacaggtaatgctggccttgtagaatagtttggaaatactccttccttttcaatattttagaatagtttaggaagaactgatattagttccttaaatgtttggtggaattcagaagtgaagcagtcaagtcctggactttcctttgatgggagattttttagtactgactcaatctccttactcattattggtctgttctgattttctatttcttcataagtaaatcttggtaggctgtacgtgtccaggaaatgatccatttcttctaggttatccaattgttcgtactgtgcattgtgcaggtaattgttcataatagtgtcttatgattccttctgtggtatctaatgttccatttttcatctctgattttccttcatttcttagtctaaagatttgtcagctttgtcttttcaaaaaaacctcatttgttaatcttttgtattttctagtctttattttatttctgctctaacctttatttttttttccttctactaattttgggttgagtttggtcttttcctggtttcttgaggtatagtgttaggttgtttatttcacatcttattttttgatgtaggcaattgttgttgcatgcttccttgttacaactgcttttgctgtatctcatagggtttggtatgtttttacttttgtttgtctaaagatactttctaatttcccttttaattttgttgttgactccttggttattcaggagcatgatgttttatttcctcatatttgaaaagtttctgaagttcctcctgttactaatttctggctttatacctttgtagtcaaagaagatacttgatatgatttttatcttcttaaatttgttaagatttgttttctggcctaatatattatctaggagaatgttccatgtgcaattgagaagaatgtgtattctgcagctgctggatagaatgttctgtaaatgtacattatgtctgttttgtctaaagtacactttaaatccaatatttctctgttcattttttgactggatgatctgtccattgctgaagtaaggtgttgatatcacctgctattattgtgttgcaatttatgtcttcatttagatctaataatatgtgctttatatatttaggtacaaatttgtatgcatatatatttacaatggtaacatcctcttgttgaattgatttcatcattgtataatgaccttttacagtttttgacttaaactctaatttatcagatataagcatagctactcctgcttttctttgggtttcaatttgcatggagtatttttgtccttcccttcactttcagtctgtgtgtgtccttagaggtgaagtgaatctcttataggcagcatacaattaggtcttgtttttaaaaatctatttagccactctctattttagctggagactttattcatttatattcaaagttagtattgatgggtaaatactcctgccattttgttagttgttttctggttattttatagatcttttgatcctcttttcctctgttgttgtttacctttgtggtttgatggttttctgtagtgcaaagctttgattctttccttgttctcatttgtgtatctgctgtaatttttttgttaccatggggcttatataaaaaattataaagttataatacactattttaagtagaaaacaatgtaactctggtcacatacaaatactctagacttttaccttaccccactcccacagtttttaattatgctgccttaatttacatctttttaattttgtatgtttcttaacaacttattgtagctatagttatttttgaccattttgattttttaatcttcatactagagatttgaaagatttacctacaccattatcataatgtagattctgaagttgattatgaatttgcgtctaccagtgagttttatactttcacatgttttcatgatagtaattattgtcctttcacttctggttgaagtactctcttgagcatttcttgtaaaggcaatctagtggtaatgaatttcctcagcttattcttgcctgggaaagattgtatttcctccatttctcaaggatagctttgctggatataatattcttggttagtagagatttttttccccctctcttatcatcccattctctccaggcctgacaggtttctgctgagaagtttgctcatagactaatggggattcccctatatgtgactttgttatttttatttccttctgcttttagaatcttttcttgttttcaccttttggtggtttgattatgatgtatctgagagaggacttctttgagttaaagttatttggggatgtttgagtttcatggatctggatgtccatctctctgccaacacatgggaatttttcacctgtagttttgttaaataagttttctgtgtttttatctgtcttctttgaaaatttcataatgcaaacatttgtttacttaatggtgtctcataagtcccataggttttcttcattttttaatcctttgctctctctcttttcccctctggatgggttattttgagttcagaagttcattttgcttgatctagtctgttgttgaagctctcaatttaaaaaaattatttattgaattcttcagctacaagatttctgtttgttcctttttaaatgatgactctttgttgactttcttattcagatcataaattgttttcctgatttcattgaattttctactgtattctcttgtatcttgctaaggtttcttaaggtcattattttgaatttcttctcatgcgattcataaagttttatttctttagggtcagttactggagaattattgtggttttttttttggcagcatcatgtttccttgctttcttgtttcttgtgtccatgcattggtatctgcacatattgtggtacaatcacctcttctaattttacagattggcatattttgggaaaaacttttacctatagatgggacctagggtgtcagtagggtagagtacattgccctttgttccaggtgggtgcagtaatatagtctctgtgcaggtttttcagctgtaatcaatgtcagcaatgcctgtgagtacctctgttgcctagtctgcagaagtctgtggcaatagtggtagcaagctatagtgttagtttcctcattggctgccaaatactttttctatgtacattgaggtaattgtgtgctttccttttttcagtttgtgaattttggtaaattacactgttgctttttgagcgataaactaatcttgccttcctgaaataaaaactccacttggtcatggtgtatcacaatttttataaattgttgggtttgatttgcttttttttttagagttttacatcagtgtttttcaggaatattggtctttcattttcttttcttggaatattttctagttttactttgtcagagtaaattctggcttcacagaattatttgtagtctctcctgtcttagtttattcatgctgctataacaaaataccacagacaaggtggtaataaataacacaaatttatttttcccagttctggaggctaggagttcaagaagctggcaagttcaatgtctggtgagaacccattcttcataggtggcaccatctaggtgtccttacatgacaagagatggaaggacaaaaagatgtgaactattgtgaagcccttttttaagggccttaaatccattcattatggaggagccctcaagccattcatgatggaggagacctcctgaccctaatcacttgcaaaagtccctgtctgttaacactattacattggagattaagtttcaacatgaattttggaagggacacaaacattcaaaccataaaaacttcctttcacttttttgaaataatttacataaaattagtattattctctaaatgttttgtagaactcatcagtgcatgtgtctgagactgcagtgtgtatgtgcatgaagatttttaattagaaattctatttttaataaatataggtccattctggttacatatttcttcttaagtgaggtttggtagtttgtgttttttcaaggaagttgttcattttatatcaattgtcaaatttattagcatgaagtgattcactatattttttatatcttcttaacatctgtagaattagatgatgtcagtgtcacctctccagtttctgatataggtaatttgtgtgttcccttaccatctctttttccttcttcttcctgatgaattattttctttattattttttaaatttcattggtttctgctttgatccttattatctttttcttctactcttgtggtttattttgttcttctttgtctaggttcctaagatggaacctgatatcatcgatttgagacctttcttcttttttaatattggcatttaatgttataaatttccctgttaccattattttgatatattgtattttcatttgtttcaaaacactttcaaatttcccttttgatttcttattggagccatgaattattcaggaatttaatttagtttccaaatatgtgggtttttttagaggtatttttttttgttattgattgccaatttatttccactctggtcagagaacatacttggtatgactgagtcctttggcatttattgaagcttatttctggtccaaatatgtccaatcttggtaaatgttttgtgtgtacttgaaaagaatgcgtgctcttctgttgtttggtatagtgctttataagtgttagatcaaattggtcgataatgtcattcatgtcttcagtagccttacaagttttctatttattctatgaattatttagagaggggttttgaaatctccaagaaatgatgtgtggatttctttatttctttcctcaattctgtcactttttgctttaggtattttaaagctcacataggtttgtcaatatttagtatcattgtgctctcctgatgaaggtatctctttaccattataagatgacccttttcaaagaacctgatgaggtttcttgctctgaattctaccttgcttgacattaatgtgcccatttcagctctgtttgattagtgtcagaatggtacatcttttttaagattttatttttaatctatttgtaactttatatatagttttgttgttctttataggttctttatatataagacttgttggcagcacatagttttgtctcatgttttaatccattctgaaaatttttgccattaattagggtattctgaccatttgcacttaatgattattttattaggtttaactctaccgtctggcaatttattttctatttgttccatctagttttttccatcttttctatctttctgctttcttttggattgagtgattcttttattccactttatctcctctgttggcttattagctatatacctctttgactatttccatagttataatggttgctttagtggttatagcatacctctcttatcttatcactgcctacctcaagcaatagtatgctaattcacttttagtctcatgacctcaccagagtatacttctgttctcctttcccaacatttgttctattgttgttgtccattccactcatgttataaacctcatactactttatttttagtatcaaagtcagttttcttttaaagataaataataagaaaacaattatatatttacacttgtggttaccatttctattactcttctttccttggtatagattcaggtttctattggctatcatcttccttttgcctaaaggatttcctttgtcatttcttataatgcaggtctgctggtgatgaaatcttccagcttttttatgtccaagaaggtacttattttgtctttattttgaaagatagtttttccaagtatggaattccgagttgtctggggttttttttctttcattactttgtaattgttgctccactgtcttgtcatccacattgtttctcttgagacatctgctgtcattctctttgttactctatacagtgaatacagataatgtctttttatttctgtacacttttaatattttctcatggttatagattttgattaccatggcccagacacagttttctttatgtttcatgcataaagttcactgagccttttcctgcttctttgcaggcatggtaattttttattggatgacacatgtgaattttaccttcttgggtgttggatgttttttgtattcctataaatactcttgagttttgttctgggaagcagttaagttacttgaaaatagtctaattcatgccaggttttgctttaacatttgttagatagaaccagagcagtgctcaattattgagttagctcaacagctaactcccattccagaggcagaaccccgtgtactctattcaatgtctgtacaccatgaagttttctgtctggctgatgggaaccggccctccgtctagtgccatgtgtgcaccgggcactgctatctcatcatttcagaggattctttcctcagagtcacatattaatccactgagggttcaagggaccctctgcagatctttggatcttcttactatgcaactctctcctctccaggtctctttcacgctaactctggctgccctgatccccttggcctctcaggttcatattctcaactctgggagttttccaggctcttcctggattccccctccctggattgtggcctggcaactctctagaggcagtagctggccagtcatgggcctactccatttgattctcatttttcaagaatcactgtcttctgttgctgatttctagcacgttgaaaactacggttttatacattttgactttgtgtttgaggtttgagtgaggaagacaattcagtccatgtttgtccaccttggtcagaagcagaagttaatgtcatagctttttactttgaagactcagacaagttttcacaacacattccttctagagaataaagttaggctctgctattgggtgtccccagatgggaaccccacttatttttaggcttcagctcagacgctacttccttcagaagtccctttctggcacactaccttcctcatgtggcttatttgttcctcttgcaccagatcactccgcagcttttgagtttgtatatggcaacaatgaacaaggtataatcctcgctgtagataaactcatcatatttgtttttctccatggagtgaaaatgttttaagctcatataatgactatggtcagggaaaaagccacacaaataattaggatatgttgtgacagtgcacaaatagaaacacacataatgtgcttgagaacatgataaatgccggttttacctttccttccctcacctgaccaagcttagcgagacgtgtggcatcttcctcatctttgctcttcagtgccaggtatggaataggtccattatggacaggtgccttattgaactgagcagagccacgaatgtcaggctgggagtgtggtcgctggagtcaggccttggtttacatcctggttctgcttcttaaccactctgtgcttcgacaggagagcaggaggtcctacttagttttggacgtgctaagtttgggatgcctgctagagatctgggggaagcatggtgaagaaagctgaatgtgcaagcctggagttcaggagggaggtggtgtctggagatggaaatctcgagccagtagcagttggttcttagtgtcatgggacacaggaggtcatataggaagcaaatgtggacagagagtgaaggggtttgaggattgggtcctgggcacatccacctctggaggtaggggagatgatgaagagccagcaaagtaaactgagacataatcattgaggcaggaggatagcaggctagggcagagacctgcaaggagagagaagagagcctttcacaaagaagggagtgaccgatggtgtccatgcttctgtgtgcttgagtacagagtctgggattctcctgagcatcctttgctccactgggatggaagatgggacctgatgagaccggggctaggggaatgtcctgagccccacacgtttgtgtctgtgtgcagggagcgtggaaggcagttcctgcttggtgaggtggagctgagagcggtgccacttagcagctatctgtgccactctggtatccggagagaaggagccggcatttgcccatccttcctcctaagccctgtcagttgtgattggaacgatgcccccgcccaccacatttgctggagttggactagagctggtaatatcagggttttactttttagtttaatttcttgcacaatgcatggatgtttattgagttttgccaataaagagttccatagggtattactgagcaggactggtctgaagataaatgaaagttgtgtacttggaaagacaatgctgtattattttcaaacccccttgagaaaaaggccttttgcactgggtgagctctggatcaggtccaatacagacagccttgcaaaagtggtgtttcagggaacacaagatgggtcaaatgatgacagtttggggggaatgagtctttgaagagctctagccctgttcttttccctcggtggctgccaggcagctggtcttcactacaaatgcagactgtcacatgtcaagactactgcagagttgaagaatggggcacaggactggaaaaggtgaaacattcttctcaaaattccaccaatttttctggaataaacattccttgttttgctgtaaacatgtggttaatttcaagaattgtgaaaaaattgactgcaatctttttttgccagttttctctttgcttttacaaaggagagattttttttttgtcattttctgtgatgttacctaacaatgttctttctaagcaatgacttctttttttataaggaaactatataaaaaataaaatacagtaaccaaaattaagtaaaatgatcaattcttggcttttatttgccaatttattttaatatatatttacaaaattggacacatacacatatatattttggcatataatatgcatactttctgtcatttgctttccttagcaatatatagtgactatcttttgtcattccgtaacatatacgccaccatttttaataggtacacaatattcagatggaacagatgcatcgtaatttaacaggcatcctctgactggatgtttacgttgtgttcaatttcttacttttatgaaaaagtccgggatgaacatcctttcatgtactttttatgtgtttgtcccaatcattttaggagacagactcctagaagtgggatttccagatcaaaggttaggatgagaaagtaagcgtgtttgggggcatttggggagggtgatgtctgtcacacaatctagactgaaagctctccgtccgtccctgcacctgtttctcagcttctacctcctgctcagtgctaggcagcctgctctgggaaggcatgctcatttagattaattcaatcagtgggtagaagggtcactcaaatccatgaaaagtcctcattttaagctatgtcttttggaaatttcctcttttggcttttaagtagcaaaacctggtaaccttctgataccttggtgaagatcagtcagatctgtaagtttttgttgtggtcctactgtgtatccttgctgtgttcatagaggccggattaataagtaaatgagaatgacttgctcctagcacagatttcacacagagtgagttttcatttatgtctagaaatctgcaaagaagggaactttttctcggttaagagcaaatacgattgaaagtatgtgatgataagcctgagacatttgcaatgggcttaaggacttggttcatcaaaagctgaaaagattaaaccacgttcagtatagttttatgtttaagcataccatagttctctgaaaatggcagttccttttcctgtattagtcccttagcattatgaaggaatctgtcccgagacctttgagacttcctgcattcatgaatgtcaccgtcgcattcagtctctctcataacatgcagtaaaggccaactgaaaaatgcctgcaactcctccaggctcctgaggagactataaatacaagactgcagtcatttataaagctattaaaacaaagtggggcctgagcccttgctgaaatgattttcagagttgttttctctctaaaacacatggcaaacaatcgcatgttagaaattcaagacttggctgagttccactttttgtatcttactttatcccaaacttctgtgaaacgaccatgttgttcaactgactttcttgctttctattcccgcctccacactaggagttgacttccttttaggtaccatgtttcttaagaaataaaacctgccttcatctatggaagtgatcatattggataacaacttgagcccccaggaattaaatcccggcccaaaaaaactgcaaaaccacagactgcaaaactgcaacctacatcgcatgtagatactctggagttacttgcaggcagcagcatctgcagtggcagggcaggtggggactgtgctgttcggaaagctgaattaactagcacccacatttcctagtgcactaaggaatgacactctgcctgcgaaagagctaaaccccatctctgctcctaagtaaatataaacattccattccctaataccttcctctcatgctgttaacttcactcagctgattccagacacacatagaacacaagggctggcctagcagacctggagtcagcccaccgttaagttcacgcaacagtattcaccaatgatctgccatctccacaccctgctaggacatgggcgggtgggggaaaggctgtcacttaaagtctctgcaggagacagatggtaaacaaactgaaaagatatcagttggttggggggaattaagataagtggagtggtggtgattgaaggctcagagggtttctgaggacctgggtccaaccctggatggtcctggcaaggctgtgcggtaggcagaggaaggagatgacatggagaccctagcgtgggatatctagaaactgaaggaagagccatgtggctggggggacagtgggcagggagaaagtgcagggaccatgtggagctgggtgggggcagtggccaccatggggaaagtcactgtgtcatttttggtccaaactcagacgtttttgaaagaaaaatgtaggtgctattagtaatcatctgggacagcaggtgtcagccgggactgtacctggaaacccatgagtagggggcttagcggacagagatggtgacatcaccttacccctgtgttgcccactgttccactggaaagtgccgcaagctggcgagcgtgtgtcctctcagttctagccaccatcaccctggtctggagtccttcctctggcaggtgggcggctccattgacaagccagccctccgctaagacctgtctcctttgttcccttctctcctcttgccctggatggggcttttaggaacactgccacggaaatgcaagaaggagctcctggccgtgaagctaaggaaccggccaagcaaacaggaactagaagaccggaacattttccccagaaggactgatgaagaaagacaggagatccggcagcagatcgagatgaagctttccaagtaagtggcagcttgcgggcacagccgggcctgtgctctggccttgcaggcggagcccctctgagatcccacatcctgggtgtgccaggccgggacgcacaacccaccgtctgcagcaggtctcttgaccccgccaccgttgacgtttggggccgtgtggaggccctttcctgtgggggctgtcccgtgcatgctcagatgtttagcggcattctcggcctctacacactacacctcccgtgacaatcaaaactgtccctggacatcatcaaatgcctcctggagggtgaattgctccactggcctgtagcagccaggcaaggactgggccaaactgatgaggacatggcttgtcagtgttagagacaggggcagtctctgttcacctctatctgatcattttcctgcaagaaggtggatccagtgttgccagatcttctaaatttgtcaagtaaagctacccccccacccacatacacacagttatgcagtcacgtgtcacttaatgacaggatacattctgagaaatgcgtcattaggagattttgttgttgtgggaacatcacagagcgcactacacaaacccagagggcgcggtctgcagcacgcctggctccacgctgtagctgatggctccgaggctacaaacccgtacagcacatgactctaccatatactgtaggcaattctagcacgttatggtatagaaacatttctcaacatagaaaaggtacagtaaaaatatgacatacaaaatacaaaatgtcacctctgtatagagcacttaccatgaatggagcttgcaggcctggaagttgctctgggtgagtcccgagtgagcagtgagtgaacgggaaggctagcacgcgaccgtgcacctccgcagacttcagaatcactgcacacttaggctacgctaaatttacataaactttttttttctttaatagtaactttttactggataaactttaactttcggactcttataataacacttagcacaaaacacaaattatacagctgtataaaagtaatttctctttacccttattctacaagctttttatatttttcaattttttaactttttaaatgttttattaaaaattaaaacacaaatgccgcattagcctaggcctgcacagggtcagaaccatcaatcactgtcatcttcctcctccacagcttgtcccactggaagatcttcaggggcagtaacatgcgtagagctgtcatctcctatgagaacagtgccttctggattccttctgagggacctgctggaggctgctttacagttaacttttttttaataagtaggagtacactctaaaataatcattaaaattatagtgactacatacagcagtaacatagtcctttcatatcatgatcacgtgtgatgtactgcacggttacacgcactagactttgagaggccttggcagcacagtaggttttttcacaccagcatcgccacacacgttaggaacgccttacaccacgatgtcatatgacagcaacaatgtcacgaggcataaggaattttacagctccattttcatcttctgggacaactatcttatatgtgtcgtatatgtcgtgtatcattgaaatgtcatgaggtgcatgtctgtgcatatatacacatacaggtatatccacatacgcatcattttctggacaatatgtgcaccaagtccacccatctgccgtctggctgtgacccagagccacgggtgggcaccttctgtgttgcacccccataagtttccctgggtggtccctgctgtctgctgggctggagttggactgtctcatggggcaggacagagtggagctgctgcgtcttgctggttgaggtctgaagggatccagtcatgcccctgagacagaatgggggccttcttttggaaggcaaggctaccatgagccgggtggagctgacttgtgtggctttccaggatcgggcacctccctagttgctttccacattccagagccactggagttcagaacccctcggagcttgctgcgtaccccagtttgcgcccacggacactgcccaaaggtgccaagagccactgagcaggcatcggtgggctttcagaggaaagtcatgccattctggcagggtgggcctctgtttcccctttcaccaggccagatggcaggctaacgtgtctcgtgtgcggtaggagaggaaattctgataaagctcaggtgcaccgtcccaggagccacagtccacatctcctgcccaccctgtgaggtgtgagtcagtctgtgtagggctgggcttggtagacagtgccctggacagcccctagtccgctccttccctctttaaacctcaaaagccaacccttccctggagggagagacagtgccccaggggtgaggggaaccagctcccggagcgccagtgcctctgttggtttgctctgcacccttgctgtccccaggcccctgagtcactggagaccctgggaaaatgcaggttctgatgctgcaggtgcagggaggcctgagaatctgcatttctagcaagcttctagggctgccgacactgctcgctgctgggctgcaggccacactttgagaagcgagggtctacagcagggtccccagccagggaaccattgatgtttgggcccagatcgttctccgtggaggggccgtcccgtgtgtgtagtgtgttagcagcattcctcccgccttccactagatactagtagtacaccctccgcttctgaccaccaaacgtgtcccagacaccgcccaacgtcccctgaggtcagagacaacagaacgctccccgggtgagaatccatgatctgaatgttggactcccgctctgggcagattttcctctgagcagtggggcttttcatttcgaggaagggttgtttctggtctccgctggggagcttgagccccagtgttcccaactcccaccaaaatccttacttgagtgttttcacggtggagggccgtgaacgtaagcaggtgaggccggcccggggtggggctgtggatagagcacgaggtcctacccttccaggtgttacagagttgtgcttggggcgcaggtgcaggttgcatttctaccagcggttgggacagccctgccgctcggcctctgcatcgtggtgtcgtcatcccaggctttcatttctgcaagtctcagtgatgggacgtgtgttcctaaggcttggtttcctgtttctctgatttctggtgaggttgagcattattttcagcgtttatcagctttttggtttcttctttatgtactttgcctgaagttttctttatcttaatgatttttaggagtttacttttgaagatgtagcttctaatccttccccattttgagttacatgattcttctctctggggcttgtattttcagttttaaaatacttttctttgaggcacaaaagttttgatttttaaggctgtcagattgctgatcataaacttgaggagctcacagcctttttctgtgaggaccaagttgtcagtactttgaggtttgtgagccaggctgtccccgccacccctactcagttcaggcgctgtagtgatgaagtagctgtagacaatctgaggatgaaggggcatggctgtgtgtcaataaaactttatttacaaaaatagccagcggtccattgggtccagctggcactttgctgacccctgatgtgctttatggttcgcactatttgtaccgtgtttaaaaatcctccccagcctagaggtcatcagaattttattcacttctgttatttgcggttgcctttacctgtaccagttaataatggttttctatttgatagtcaaaccaagttctttcaaattaaaatactaagtgaattgatctaaacaacaaaaaaaaaggtaagtaatggaagatagtacatgtggttcaaaaaacaacaaaaattatggtggggcttggaatgagagatgcctggggtccccaccgccgactgtgaaggttgagaggaagttgggagaaggttgggctgccggggataccccaaacgcccccctatgtaagaagtaccaaaaacatgggccctgtggcttgtttttactccattacttactgaatctggaactaattttaaaccttggactggaatgtagtagctccctgctatttgtcaccatgtttaaaaacctggaattagacacagagaaaacagcagcggagtagcagcatcccaggaggtcagacatggcttcctggaggcgccatttgttttccctacagcagtggcttaattggtctccctttgtctctgctctgcctcctttcagagattcctccaccgtctcttgctaagtaattcagcctctggttgccatggcaacgtgccatctactgtatcccaaagaacatttgcgatttcctttttttaatttccagaaccttcatattttatcttctgagtgttcctgggccttttcctggtgaagcagtcactgctccccacggctaccccagaacacatccgtgtgcttggtctgggacccccaggaaagtcagggtcccatttgaaagagtgaagctctatgctgattttcacccctctctgtgtaggagctcagcttacctttaaaacctgtgtggatgcatcagcagagtatgagaggcccgcagctcctgcacggtaggtgtgcactggaaattatgcacagaggcacgggctgttttgcctccatcctgtctacagccaccatctaaggagagcagtgggaagcacctgctgccggctttcagcataggtgccggcgatgtgcttgacgtctgccttactttctttcatttatctagtcttcacagtaacccagtaaagcaggtggtactatcatctccattttacagatgagaaaattaagccttggtgagaaggtaactggcccagggccacgtagcttgcagaagctgccgtgcagtgagataggccatttgttagagccctagccctgggcctgggagaagcattctagacacgaaagcactgtggctccttgtttatcttaggcatggctttgaattttcttatattggtttggctttgatcagggtatcagctggcaactgggcaatgcaccaggtgtctcgggcaaaggacttcacacttgctctaaagcagtgcagaatgttggccgggtccggtggctcatgcctgtaatcccagcactttgggaggctgaggcaggcagatcacttgaggtcaggagttcgagaccagcctggccaatatggtgaaacctcgtctctactgaaaatacaaaaattagccaggcgtggtggcaggtgcctgtagtccaagctactcaggaggctgaggcaggagaatcgcttgaacctgggaggcagagtttgcagtgagccaagatcatgctattgtactccagcctgggcaacagggcaaagacaggggggttgggggtggtggcagtgcagactgtcaacacagcatggagcagtggggggttggacatcctcagggggaacatatagaaagagacactgcccagcaagggctctggaacagtgcagcaagcaggctagagccccagccgtctttgtctcagctgcgtgagataggccagcaccagtgtctcagaatctctctccttgtttgtgaaatggggatggtggcaatacctgcctcagggccctctggaagattccacattggtccctgaagaaagtcataaaagcacattctcagcagggggtgctggggccagagctgctgctgtcacagtcaaggctggatgcactcctgggcgagctgtcacctgcacggggcagaggccagcagcaggccttgtggcaggatgaaatgaatgctgctgcatgaacagcggtcacgatgctagtgggccagggagtgcaggagcattgctgttgatggggcttgagtgtcattcccattcgtgactgttgtgtaattttgcccgaagagagaggaatagggtaggcacctcctaagtcatgcacaaactgtcattccccttggggcgttctttgctcccaggaacgtgtgtgagaagctgattaatgctcagtagcatctttcaggagggggcacttagcatgttcatacagcagttagcggatctctgagtggcttctctgcacgttttgtcctgtggcctccagaacacgctgcaccctcaggtgtcctcccgggctgtggcctcccactcctgctctgtctgcaggagcaggacacagcgtgcagcgagtttagacgctccctcctctagatgtgctttaggcaaggcaggcctatttttggtcctggagacagaacgcacagaaatgtggagacagacagtgtccccgcagaggctgtggtttgggctgcaaggcggaaaccgtgcctggccagccaggggaccagcctgtctcaatggggccttcgttctgctgtgagcttttacctgaaactgcatggacggaaattttcacttccacagaaatggtgtttggtaaatttcagacacgtggaagcgggggaggaatcagcttccaatgccagccttcataatgacaccactaatagcatctgagagggtctgccgtgacgctgggcaggtgcagtgctgattgcctgtgatgccgagcagggaccatcatccctgctctgcagatgaggagactgggcagagaggctaagcagtgtccctgggtctcacagttcatgaatggccaggctgtgggctccagggccctcgctcccagccactgagccttgctgcctgaggccaagcatccggctcacaccttgtggacagggccgggaagctgatgatacactatagctaaaggccagtttccggtgaatgtttgtgttaatgaggtggttatggtccacgttcactgggctgagtcctttgcccgctgatgtctgcaaccctgaagttctgtgctcggtatggtgtgggtgctgcacacaggctccttcatggatcttactaccttccccaagaccctcactgaggagcgaacacacctgacatgggtcactcccggagcagggctgagctgccgcaagcgctgacggtttctcttgtcacagttatcattgccgccctgaaaaggctgcaaagtttgccttctgcctcagggttaatccatggctgctgggatggaaggtagcatttgaaattacctacagggggaggctgcacctgcagaacgggcccagttgatcctgtcacatccaatgtcattgcccatctcttggggtgcttaccccccaattacagagatttcgaattcatgtagcgtgcacgtgctaggcgctggggtgcagagatgaaaagatgcactcacaggtgataaattattgtgtctggtgaaagatgtacagagatagatgtgtggaccagcttcaggagggagggtgagggtgtcccaggcagaccagccagtgagagctcgaaggtgggaagcagcaccgccttcccaggactaccctgggggctgagaaggttcagggctgggtgagggtggcagggcagagggagaagactggaggggccatgggtccaggtggtggaggctcctgtgctgcccgctatgggttcccaatccacacagacctcctcttgtcattctgggctcagctcagatgtcaccttcctgaccatctcccagtggcacagcctcgccattaccctgtgtcacatcgtcccctgctgtgtttttagccacttccacagctgctgaaagtgccgtttactcatctgttctgttcgcctcttcagggtgtgcccactggcgtggcggggccctgctctgctcttctgtgagggccttgcccaccaaggaggcgctggctaagctggtgggaaatggcagatgaggaggcctggctctcccgagaagcagccagggctccctgggggtcaggagcgagggcatgtctgggaaacgcccctctgctgcagtgcagggctggtttgggagagcaaggctagagctgggtggggagacaagggtttctcacatgctacaggcccaggagccagcaccatcctggggacgcggggctgcagagaggacggcagagctggtgaggatgaacggcaggcctgtggctgagggaggagggcctgccagcctaggggtgggtggatctgcaatggtggagagggaatccaggaagaaggcaggcagacacaggggaaaggttatatgtccaaagggtccctatgccgtcaggtgcctggggtttttggcagtgcttccatccacttgtgcaggtgagactgcccaaggagcacagggactggaacgggagactgcccggtccatgctggacttgctgatctcagctgaggtcgagggtattcagagcccgtcgtggtgttttatacggtcctgtacttcctgttatccttggtccattttcttctacactatcttccctccagtttcacacacttggacagaagggagtggttgtttttcactgaccgccaggaaccacaacaggcttctgtgtgttccagtgaaataagccctatctgtctctcgggaatggagcagtgttaagctttttttaaaagcacaatctgaagacactggggtctggaaacccattttttcttgttctgaagcctgtggggcctccgcggttgggccttgctgaataatttggggttttaggttgggtacatcaagggtaaagggcttctgtttggatcaaacaggaggtggggggagggtgagattccctcatattgctgagaagggagttgggggctgagttccccgacttcagaggtgagacatctcacaagccagaccttgggactgtccctgtggacccaggctggactgggaagttcagggaaccctcgactcgaagagggttcttgttaatgaacagtcttcaaggagcaaagcccagactgttctcccagtgtggtgtacacatgaggagggacctcatcggggggaatttggcttcctgatattcaaaagcacatttgtctgctcagtctctgaaattgccagtgggacaatttccaaagggatcaccagaaagaaggtaaatgcagagacgaacaaggaactcatcatacccaggatcgttcttgatcaaaatgccaacagctgggcatcttcagccaaaagaaatgcagttgtggcaggaaagactcagctgtacttggggttctggtttttttttttttgtttttttttttgagatggactctcactctgtctccaggctggagtgcagtggcgtgatctcggctcactgtaacctctgccttctgggttcaagcgattctcctgcctcagcctcccaattagctgggattacaggtgtgcaccaccatgcccagctaacttttgtatttttagtagaaacagtgtttcaccatgttggccaggatggtcttgatctcttgacctcatgatccgcctgccttggcctcccaaagtgctgggattgcaggcgtaagccaccacgcctggcttgggtttcctgttttatagtgaaccccaaggttgcaaaacaggcgatgaggcttgtgatcatttatctttatggatcatgggtctgcgaactggatgagagttttaagcatgtcaggtgtgcaaacatctcctatggttgtgggaatttctccttgcatagccaccattgtctagagcagcagtccccatccatttttgtaccaggaaccagtttcatggaagacagtttttccatggaccagggaggaggatggttttgggatgattcaagcacattacctttattgtacagtttatctctattattattacattgtaatatataatgaagttattatacaactcactgtaatatagaatcagtgggagccctgagcttgttttcctgcaactagatggtcccatctggaggtgatgggaaacagggatggatcatcaggcattagattctcataagaagtgtgcaacccagatccctcatatgcgtagttcacaatctgctgagaatcgaatgctgctgctgatctgacaggaggtggagctaaggcagtaatgcttgctcgccactactcacctcctgctgtgtggccaggttcctaataggctaggttgccccagatgggtactggggttgggacccctgttctagagcagtctgcacgctggggactctgggtccatgacagtatttccttcctgtgtgataggcctcacagcctccactttgcatgtgaggaaatggaggctcagaattgttagtagccagtgagtagctgagtgaggacatgaacctgagtctttccagctcaaagtccttttccttagcctatttcacaactccctggaactcatccatggccatcctctggttcaaattatcctccacctaggcagtagactttcctttaaggaaggaagaaacttcttcaatgttttatcctcagtgcctggtacacagtaggctcccagctaattactgttgaatggatggttggttagatggatagatggatgattgtatgattggataggtgggtggttgggtagttagatggatggccatctggatggtgggatgattgaacaggttaatggctgctggggtaattgcattataagatgcatgagtataggtagatggagagacagctggatgaataggtagatgggtggataagtggtgggatgttgtgtagttagatggatgaggaggtgaatggagacattgttgaactaaatggcatcctattcactgtgcttgatgtaccctaatatctgtccatccatccatgcaactgtctcagcacgcacagtgggttagatggaatttcctaagagtttatttcaataaaataagagtttagttcagtacaataagtgtttattgaatgaatatctctctttgcatagtgggctctttggatacatttaagcaatgattccatttactacattgattataaccaacctattcagaagtgtatttgtgaatagtgtgagccctcaggacctcagtggccattgccaattttggagactggttctgtgctgtctccaggccagggtctgcatacgcttctggcgacaccactgccgtctggctgctgaccagcctgggctatttctgagctgcaggtccttaggccctcaggtgaggatactccagaagcctccacttcaccctcactggaaggaagtctctggtggaaacaagctactcctaaagctttctgagcacttgtcaggaggaataggagagaaagctttatcggaatgagtaagaccaatagtattaacccatgactcgccacaggaggcgggtgggggatggtgtcttcacagctcattcaacagagtagaagtcacagacccaaatgctccataagtgacctgggccaggcagggctgtggcatcctggggagtgtgcactcttgctcaagagggcagctgtcactcagatcctgtgggccatcacccctggccacatgtcaggccattgtggccagaatttccaagagaaaccgaagatttgatttttttggtgaaatagccttcatgtaaatgttgagagcctcttcctatttttaaaagcaatgtgtgcacccagaaaacatatttgtggaccagatttggcccgggaccacccactggccacctctgatgtgaagtcacttatgcacttgtattgggagaagtacatgtttctttacactgaggttaaggggattttcaactcttgagttagcagggaaaataaatgggtcatcctgtaaagtgactgtcagcagcggaagcctccagggctaccactgtcagtatcctagggagcctcagcgaacctgtctccttcctcgcatatgtgagggggcccttgtgtgcggccctctcagctccacccttgctctaaggaagccgcacagtgcaccgctgagaagtcaggatggacagaatgcctcggttcccagccagctctgcagttttccagcatgtgggcatggggaagtcacctcctgacatgcgccttactttcctcctctgtaaaagggatgtgactacaacagagcctgtcttttggggccacgggaaggatgcaatgagccgtcacacgtagaatgcctggaatcatgcctggcagagaggaagctctccaggaagaaaaggaagaaatctgagttccatgaggatagggaatttgtctctttcagttttaacagctttgttgagacataattcacacaccacatgcttcacgcactttaagtgtccaattcagggcttccaacatactcatagagttgtatttccatcagcacaatcgattttaagatattttcctcactccaaaaagaagcctctccctctcagctgtatctccagtccctagaatggtactgagtcctgtgggtactcggtgattttgcagctactgctgcagggacgaaggggaaactgcatgggaaggcatctcctaaacatgaccagttattggtgtcaccattccctttgcttcaccaacttgatcttcttcagatccttttcttctgcttcggcatcttttcattgtcatcattttatcttcatcactatcatcaccttcactgcttgtttatcatcatctttgtcattttcatctttttcttcctcattatctttccatcatctttagcaacaactttgtcaacatttttatcctcatcatcattttcatcatttccataatcacgaatttgccccatctttgctccctaggagacactcggggaacttgggctctcaatccccttgacgtctgggggcttggcctatgaagggaatgaagcccacatctaaagcaggttccggagcctctgctgagtctgatcgtgcctggagtgaagaggactcttgagaatggtgggggctgggcgcagtggctcattcccgcaatcccagaactttgggaagccgaggcaggagaatcgcttgagtccaggatcacttgctgtgttgcccaggctggtcaccagacctgggtgcccacaggcagataagaggaaggtgcctgagtcaccaactgcccacgggactgaggcacctccctcttatcttcctgctattttccagatcagcctgggcaacacagccagactccatctctacaaaaaatagaaatttaaaaacagctaggcatggtggtgcacacctgtgatctcagctacttgggaggctcaggagggagagaggatggcttgagcctaggagttagaggctgcagtgaactatgatggtgccattgcactccagcccgggcaacagattgagaccctgtcgttaaaaaaaaaaaaaaaaagaaaacaaaatggtgggaaggtgagtctgagccgggaccctgcagatcccacaggtccagctcaggttgccacccccgtgtgtggcctggttgggccggtgctgtcccagtactggccacccgtcaactgaggcacctggttgggccagtgctgtcccagtactggccacccgtcaactgaggcacctgattgggccggtgctgtcccggtactggccacccgtcagctgaggcacctggctgggccggtgctgtcccggtactggccacccatcaactgaggcacctggttgggccggtgctgtaccggtactggccacacgtcagctgaggcatgcagggctctgccatctatagccttctttggattccgagatcccaagaacagaagctgttggcatttagcaatttatgattttcttcctttttttgatgctgcagatttatccgactgactttcccagccctccagggggaccgttgctggggcttccggtctctctttgtttagaaatctcagggcaagtggagatcaggtctgttctgcacagatgcaccttcctgagctcttggcgtggcaccacctcctgcttcaccactgtggtgaggggtctgcctgtgaacactgcagagcctccaaggtcaagaagaccaccaagatttatgagggcactttcaaggatttgttgcaaaaatgcgaaggagctcacgaggcagtgctgtgagcaggctctgtgtggtattgtgggcagaaatcaacctcagccctaaagggaggggcctggtagtcctgcaaaggccggggcaggcaaggccagcacggatcaggcaaaatggtggctatcatgtatggatcttgtacgttctgcttttagatggaggtagctaagcaacagaacacacagcttccaaattgggacaagtttaaactggcaaatctcagccccagaggatataaatatgacgcttcatcgtcttgggtggaagtccccgtgtacagggagggaaagcccatctgtgtgtggcatgcagggtacagggagtgggtcccgagtcccatcctgtgcaggggagaggctcaggccccttctgtgcagtgtcaatatgaagtggccctgtccctgctgagggctccagggagggtcagctgctgtttgttttccttggttgcttgggaatctgtagaggatggtacagcatgttttgtaagaaaatgcaaaacaacatcaacccccattcagtgtcaataaaacatgattcccaaaccagggagcaggtggtttggtggacttggaggctgcctggctgagagccatgggctgagtgagcccagggaagtcacatggtgagtccaagccttgaaatgggtgtgtgatgtctgcctgctcagatgcttgcagggactaaataccacacagtcctgcttcacccaggatcggggcttagcgtgtgtgagtagtagtcatggtaataagagcacaaccatagctcactaacatgtatgaaacccatgttatgtatgaggggtggtgtttgcctgcattcatataaacataagacgtaaatgctattattggatgttcttagcagctaaggaaatggaggcccagagagattgggtaagatgctcaaagtcacacagctagtaagctagtggagctgagatgtgacccaggtgggccgactccagaccgcacgttagagccaccccactccctggaatagttgcacaggcggtcaggactggcatggttgttccaaaatcaacaaggacgcagactcctcttaccttcctgctatttacccttatgccggtgttgatcctccatggtccagggtggctgcaaaggcaccagacatcatattcaagtcccaaaggggcatacatctcagctgagtcagcttttccagagggctcctcccagaagctcctccacacacatctacctactgctccttggttggaccctcctcatgtggccgtggtcagctggaaaagagactgctctgaataggaccagcattcaggcataagaaggggagaagggagatggggtaggaaactcgcggcttctgctgctttaggtgttcaagttaattttgttacattaaaggaagaaaagaagcaacaaatgaagagatggatgagtgaatggaaagcattctgtctgttaggtagcaatgatttctaagtgatttctggagcagcctggtttgaggagtgcatgtggatccctatgggcttggagagcaccgccggggaatttaaaaatgccccattcctgaccctcccacactgggccagggaggtgagcagctggcaggaagttgaggaggaggagggaaagaggaaccctgagaggcgctgagagtgatgtggacaaacacagctaccccctccccagcaatcctaccctttctgcagcgatcccaccccttccccagcaatcccaccccttccccagcgatcccaccccttccccagcgatcccaccccttccccagcgatccgccccgcaacgatcccaccccttctccagcgatcccaccccctccgcagcgatcccaccccctccgcagcgatcccaccccctccgcagcgatcccaccccttccgcagcgatcccaccccctccgcagccatcccaccccctccgcagccatcccaccccctcccctgccatcccaccccctccccacagtgatcccaccccctccgcagtgatcccaccccctccccaatattttagttcagcaacagatgtttcctgaacagcctctgtgtgccactctccgcactgggcctaggatggggggaagaacaaagcagatgcgggggctgccttccgaagcttccattccaccagcaggcgtgggggaggggaggtcaggtgaacatgtgtgtggcacatgtggaatatgtggctatggctagacacgggaagggctgcagtgcagagtgaccgtgttccactcaggtggcttccagcatcccctcctgggctggtgggcgctggtgcacctcagtgccattgctgatgaaggtctgggtccggtggaaatggtgtggtctgcagatgaggtgcgcctgtcttttcttaaatcaaggacactttcagatggatttggtttctctctgactcggctcgttcagtcagcctgacgggcacctaccgtgtggctcgggccccgtgctgggcaagaccctgcctccagctcccagcctcactaggagtgggggatgggagtcacaggatgtgcccagtggaacagccgccagggcaggtgaatcctggagagcggcgggctgttcaggtctgggaccctgggaagccacagggaggagtgcatgggagtgaccctggaagcccagagatggagatggggaggggaagggctggcaggggccctgcccgagcaaaagatcagaggcagacaatgctcagcgtccaaggaggaaagcggaaggagctggagggcaaggcaggccctggtacctggcaggtgctccattggtgcctgtggaatggaccccaaaggatcttagccctgggagcaggcagtggggagcattacgtattctttccattttcaaaatttgaagaagggacttatatacatggtaaaaaataaaacggtacttctcactcccacctcatccatctgtccggagtcagccactgtccacggggccatttgtgatcattcagaagtgggtctttataggagtcctaacgcccagaacagtaatctgcagatattacctcccatgtgctgtgcccagctcggggtgagctggaacctgcggtagatccttcgctcggcatcagtctctggagggaggtaaagacctgtcctcagtgctcagccccaggtgactactcaaaaagccatttgaaagaagagatcataagcatgatttgttcatgctttaaacacaattttaaaccatacagatgtcacttgtttggccgtcactttgaggtagaatccaaggacatttctttgaggaaggatctaccaacttaagttatttttgctctaaacaaaggctggatgtgtctcctccaagttccactgacagtttctttggagaggagtgagtatttaaaggcacttggaagcaatctcagtgcagaatccttccagagttttaaggccccacctccccagatctcacttctctctcccacgcaaactgcacagtggtatttttagcaacttgcctctactgactccaaagcttagttttcatggaatttacattttcattttacacccatatgagatcatttaatcaatgtgcattaaaagcttaattacatttattacagagacaagtacacctggtacaaataggtttgggaacagaagcaaccagttcctgatccatgcacagctcagctggtgtggccaggcagttctgaaatcaacagggaggccacgaagtcagcacgggatgcccagcatggctggagccactgaaggatttctgcttcaagaagcctcaaccggtatctaaggccttcccactgatcagatcaggcccacccatttcagccaggacactctccttgacttaaagtcagctgatcacggcccttggtcacatctaccagacgccgtcacagcagcacctagaggagtgtttggttgagtaactggggactgggaccccaccccccataccattcaggttgacacatcaaattgaccctcacagattcaaggttggcagaaagctcatgagcagatgtaagattgcactcagtctctcactcacagcctctctcctcaggtgatttgtagagaagccactattcaagcaaagggcaagttcaaagcttagactcttaatgatgatgtggttttgcagtttctatattcacgtttattcccttttatcttccccagagtctggctgggagagccttccacataagggctaatggagcagcacccggttcctttctgtaatggcattgaattccactgcagggttgaacacaggtcctttaggcccaatgggcattaaggctctgccctgtgcttggctataatgaacatcctcatacgtgtgtctgtaagaggcccatgtggaaggatgttcacacacatcagaaatcttggaactggaactggcaggttagagaatatatgcatctgtcatttttgacctgagcattgaccaccagggaatgcccctgattgacagccccaccagtgggggggcggggggaggggctctgtctacactcctgtcaacattgtggattttccaactttctgccctctgctgatctggaggtggcacagtgacgtgctgtttggcacaaccacacactccatgtggttgttatttccatggaggtctgtgaatgacgatgaactttggacttgccccacaacagcagcccagttctactagtaaggcagagctgtgtcccacaagcccagaaccatgccccctgcagcggggcccctgtattgccagtggcttctctgttcattttgctgtgccagcttgagaggctgtgcaggggctggggattcagcagtgaccaggtagacaaagtctctgcccttggaggggtcctgagtccctaactggccagcttggtgccttgtcctgggttggcacacatactgccttttgtactctggtggcagctgtgcaagcgtgggactgtggtgtctctttcacaggcttggagggtggcttgcccaaggttgccttgttgctgtcaaaaccagcctttgggctcaagtttctcaatgtaaacctggcgttgccttgatgtcccattcatgtatccactcatgcattcagacactcattcattcattcagtcacttgttcattcattcactcgttcattcactcattcactcattcattcattcagtcactcattcattggtcacttatcacggaccaggcttggttccagggccctgagtacacagcattgggtactactgatgcagttcttaccattgaggtactcaaaacataaataatcaattctggccatgaaggccacaaaatacacaaatgcactggggagcaacctgtgcagaaaggagccagttacttcagctggaggagtcggggtgggctttctggaagaagaggtttaagctgaaccatggggagatctgggtaacaactttctcagcagagggaagggcccaggcagaggcgctgggtgggaatcagcttggcatgtgctgtggtctgaatgtttgtgtcctccccaaattcatgtgtcacccccagtatgatggtggttgtacatggggcctttgggaggtgattaggtcatgagggtgcagtgctcttgagcgggattagcgccctcaaaaaagggacccctgagggctgcattgctccctccaccatgtgaggacacagtgagaagatgctgtctctgggaaagtgggtcctccccggatgccgaatctgctggcacctcaaccttggacttcccagactccagaacagggagaaatggatttttgttgtttataagacactgagcttaggggactgtgttgtagcagccgcgctgggcaagggcagctcagcaggtcagcatgaccaaaggaggacaaggtatggggaggagggagatcagtggggtgggggaggggaggggtgctcaggggcttcgaggaggctggagctctgctcctcagcaggttgtctccctccaggaattccctgccacaggctcgggcctctgggtcctggtggctgagcacagatcttcgctgagtgtccctggtctgggccaatgtggggccagcatcttggttcttcccagctgactcaacctgggcttggctcacccttggctgggacccaaggaggccaggcagggtggtggggcccagtggggtgtggggcacattccttccagtgcgctcccctgccccagccttacacctggcattacagggcacatgctgtcctcaccctgcctctcacacctgctgtctctgcacacaccctcctggccctgcctctcacacctgctctctctgtacacactgtcctcactctgcctctcatacccactctcccacacactctgtccctgccctgtctctcatgcctgctctgcacacacagtcctggccctgcctgttacgcctgctgtctctgcttccctctctcacgtccttccctgcagggtgcgtctctccctcctctttgcacacatgttcttggcctttcttcctcactccactttcctcctttcaaaagtagcattggcagggctgggtgtcactgtgaatgacattctctgcgttaccttgactgtgagaacagaaagtgcctctctacaggtagatgcgagtttggtcctgaaagtcaagggcctggttttcctccggaggatttgaatccttccctctccctgctcccctcccttctctccttccctccctccttccctcccatagttctcaggcaccaggtgattcctcagtacctctgagagtccccagatggaaggtgacctggatgtcccttggtgtccatgttgctgtctttagcacctggaagaggaggtagaaggggcatgttcacggtggggttggggaagcctctcagggcagcccgggaaccatccggagagactggtgctggtgaccagctggccttcatgggcgggggtgcacgtgatcttggtgcctcacctgagcccttggaacacccggctccaggaggctgattggaggcgagacccctccccaccaccactggggctgttcctggtgcagagggtgaaggactcatctcatctgtatcccaggggcactaacccaaccctgggcagggcagtctagagtccctttttggcttagggtgggccacagagccaggctgacaaaacagaaatagcaacagtgatggagacagtgcggtgtgcagcttgcggagcccagggcacagcggcctggctagccccctcacatacggctctctcctttcagtctcaccaggtgagaccatggaggtgcagagaggagactggctgcacccaggaggtggaggacaagagacactggagagtctgggaggccaactccacgtacctggagttcttttctgtgctgccctgggagggagcccaggctccaggggacatatttctcctgcagggtggggttgggaggacagagtaggcaggagcctttggcctgaaggcttgtcactgtgggcacaagaggcatgggacaccttcccgacatcagaagccccccactgcaccaagcttggcggggcttcctggtggagttgaagttgccctgcctcctatgccctcaggacacaggaggcaggccagccgttctgttgccttttggaaactcagggcagctctgtggattgtcacagcaactggagctcctgctgtattttcaggatggtcccgggaggcaggtgttctgcagccatggggcactcccttagcaatgaagactggccccccattccacttgacttctgaatgtccctgggacactcatgagagtccgaagcctgtttatgatgacctgagcctcatcccaagtgcattgtggacacacacaggaggtattttggtggagctgtattacaggtggcgtctcctggaatgcaaaatgccagaaacctctcccacagattggggagggaaccttgctttgtccagagcttcaccaagaagcattcctccactagtgtctctcagggcatggagtgaccagtgtggcagctgtgggtctgtctgcattggtggctggcactgtgatggtgatttttctgtagcggcagcattggcattgtgtgctgtgtcacccaatccagccatgcctggcacttacttacctatcggaatatgtgttatttgattaaaacttaatttcctttttcctcctttatattgcagatagggtgttatgttgtttttttggttatgcgtgtcagggatttggaggaaaagggacaagacagaacaattgtaataatgggggtgtgtggggtacagtggggctgcggacccgtgtgaggagaaggacatctttgccggacagggacagtgtgaacagccacttattggtaaatgcagctcgacgtggggccatcacccggcatggagttttgggaggggtgggagtaggaggggctgctggaggggtcaccgtaaactgaaaggctttgctgagggccttggagtttgtcctgaggatggtgggaacccgggcttgagctcatcgtgggagtaggagttagagttatgctgctgtgggcagggaggtggacagtgtggaagtctccatcatccagggctgaggcttgtggcctggatcagggaagtggccttggggatggagagaggcagatggatggatggacggatggatggatgcaagcagaacccagcagacttggagcttcctggggtgttggacgtagggagtaagaggagccagttctcccaggggtctggtgtgtgcctgggtggtggctggagccagcccctgagcccaggatgctgggcacggagcaggtgtgaggaggtggggaacagggtgtgaaaaggtcggctttggactcagagtgcctggagtcacatcctccccggcatcccagaagtcaggactgctggctgctgagatggggcttgccccaggcatgtggaccagcagccagcacctctcagctgagccctcagtcggcagaacatccctgcttgctgtttcctagtgtggacacactccatcccctctgcctggatgcccatcccaggtctttccctgggcggtttctttcatcatccaggcctcatcttatggcctggagagtcctcttctcttcctgaacttctctccagacacacccacattgctctgacgctctgagacatagggtcaatgtgcctgtcatccgtgcacccagatggtgtgcgcctgggggcaagcagacgagacatctgccccattcaccatcagatgtctgaggatgcatcaatgcgtcgtgtgaatggtgtgtggagacgctgcctcgctggggaatcccatctccaggcgggggccgccagcttttctcagtgactcaaggcggctgtggggcaggattggcattcccagaaaggagcctcccaaaatagcccgggcgtcccctgtgggtgtcgagctgtctgttctctctaggaaggcattctgccttgtatggaaggaattgcttctcaatttctgctccacactgaggtgactttagatgttgattcaaaccttttctgtgacatctgtgctggggtgagatcaagatttgggggatgtgcgtttagtggggcagcctggctgggtggggcttcattggggaagcaaagcttggggagctggaactatgcttctcctgaccccgtgtccttccacttcctgaaattacctgcagcccctgctgctgtgctcatcatgcaggaaggcagtcagctgagcagtgtgtgcagaggacgattcagaaactggtacaaacttggcactgagacggcgtctgatgggagaagagggggtgtctgatgaaagaggctatgacagacaggagcatgtgcgtgtctggtggaagagggtgtgcgtgtctgatggaagagggtatgagtgtctgatagaagagggcgtgagtgtctgatggaagagggtatgagtgtctgatagaagagggtatgagtgtctgatggaagcaagtgagtgatggacagtgtgagtagatgatgaaagaaggtgtgagtatttgatggaggagggtgtgtctgatggagacggtgtgaatgtctgatggagagagcatgagtgatgaagagggtgtgagtgtctgatggaggaatgtgtgggcatctgatggaggaagatgtgaacatctgatggaggtgtgaatgagcagatgttgaaagagggtgtgagcatccgtctgatggaggaggctgtgagtgtctgaaggaggagtgattcttggggatccaggcctgcaaggaggcgctgggcaggatggagcctgcagctctgctggctgaaggtggaagagacctgggctcagcacgccaggtgaataatatcagtgctatagtagtaatgatgccacctatttgtgtgtcaacctcctcctgtatttagtgttctcgactctcccagcatccctgtgggttttgttggcaggtgttcacctggggaatcagaggctcaagtaagggagggcgtgacgccatcacccagctggcaggggtcagagctggaactggaatcctagctctgtgccagtgctggggcaccagtgctgactgtggaatagacagttgacagcctccacagacctggaaatgtgggtggcacagtggcatcatgactcctggagcctctccaggcgtcctgactgtccaggctgtcggcggtctcatcagctccacctctaggccccttcctccccattgtttgtcccctgctccctgtctcctctgtgctactcacagcacagggccaggtgtgtcgtaggtgactgctacagatctgtcgtgtgagaggcactcggaaccaggaagtgcctgtggggtcacctgtttggctggtgcccccttggcccccagaaatgactcacatccacacttgaacatacagacatccttttccagggtgtgttgtgctcgatacctttaattcctgtctgcattccagggcctgcccagcctcttcctggctccccagcccagcctggtccttccggcctccctgtcatccccacctctcgtgtgtgcacaagcagggaccaggtagggagaccggcagatgctgctctctgtccctggggtttcttttcttagtgttgctcccacacccacgcgatgctttaattaactgccacactcaggctttctcagtggggagagtcagaaatagactgtggcttccccagctccaggcggcaccaggacgtcaccagcagccccatttctgaatcaggagtctcaagcagctgcagagggtggggaggtttggggaatcccacaggggttctacacccccacctaccccgccccacccctctgcagggccttctgcagcttccaaagcccagctatgctccggccacgtctctagcggctcctcggagagcaacttgatactgaagctcaaagcccaggaagccctggcggcatccctgccccagccaggtccaagcaggctatgtagtgagggagaggaaccggcgcccattcctttgctcctcgacacaggctgctccccttgcctgcgccggctctgggggtctgctctcacagagcttcatgactcgttcaacctgactgcccttttcctggccatggttctgcctagaaaatttcctgggccaccctggcctgagtggcgactgtgtgtcagggcaggggtcagcacactgtggggcaggggtggtggcctgtgatgcatgcctctgcctgggcctgactctctgtgctgggagaatgcttcctgggcctcatcccagctgtgtccctgctggctagttcctgccagctggtgttgccggtgttcctccctgcctcagccctcccagcatctggaactggctgtgggttctgattccagctgtagtagctgctgatcacattcctctctctgagcctcaagggtctcgcctgtaatgttggcaaagtaattgtctgtccttggcatcaggctcgtcaccatttttccttttggaagccccaactctgcatgaagagttagcatagcttcaggtagcaggtggacaaaagggtatcttttatgtatacttagggtaacaagtattaatttggagtgtggggtgtttttgctctgtggccaacttcttccccaagtcttgaacacttcagggggccctcacaggcctgcagcacactttgtccttggtatctggtgggggtctgggcaggtccgtatctcttggtagtgggttcatctccatctctgttggacagaaatctggaagagtccggagagtgtttgcaaatgcaaatctagtcctggcacgcccacaccccatctcacccaggtctgctttaaatccttcagtgccgctctggggttccaggagtgaatccagactctctctccagcgatgccaggctgtgtgggtcctgcccctgctcagcctcggtgcacacacacctccatgcgatctaaacgaccccacctcaggacctttgcacatgtcctctcctcacctagcgatccccaatcatcctctggatcccaactaaagtgtcaccttctgggaagccattcatgtgcagattagagcctagtctgaacggtggcctggccttgttgggttggcagaaccaccctaagaccctgcttagcaccctcacctggcagtcaggggtcttcttgctcacctcaatcccctccactggtgagaaccacagggagggtcttggggcccacagcactgtctagggttctgcatccacccttccaggtgtggggtcctggcactctgtaagtagagaggcaggttggtgacaagccagtggggtcctggcctgagcacccttttgctctgtttacaaccctgtgcctccggggctgtgtctacccagaggactgcatattctagaccattcaggggtaccctgttgacattcagtgagaagcttggcagctagatgaagccctgcagtgagcgattggaccactaccagactgcctctgtgccttgggaccaattgcacagtttttgctggcttgatgtccacgctttcctgaggtgtaccagttggatgaaatgcttttctgggaacatggtccgcgatcagctggcaagtcacaggttgggttttcttgagaaattactatatcccaagcatgcattgtcacaaacatttttgtgcattatctcatttaatgctcattaagagggtctggtactaattctcattttggatgagaaagacaaggttccaacaaagggcggggggaagccttgttcgggggccatgccagtggacactagcctccagggacatttggggtacttctcagatttgaggaaatgcacagcctcactcctcaggtgtccctatgggtgttcctggctgggcagctggctcaagaattgtcttgagccacacacaaaatacaaatggctggggccagcatcgcggacagtgaaagagtttaccaaggcagttataggtaaagaaaggcaaatttattagagaaagtatgaagatccgttgcaagggtgcaatgggcagcacagtagagaaggggctgctggaaagaggcaggcgctggagggaagttttatagggttgtgccagaggggcttatgtgcagataagatagtactgctgggtcttcgagtggaacaaggtgtttggaaataggatgtcatgccagtgggttgtctgtgattagctggctctcagaacaattcttctcccccacctaggaccccttcctcattgttgcttacttattaggactccacgttttacttcccaagatcccattcctatacacagcctctccctcttagccagaggagctgtgcaaaggaagtaccttttcatgggtaaaagactcatggtgcgctcactcttgctgggcttcagggatttttcatttctattgctctaaaagtgcctgtgtgccttccccctccatcccatctccttcctgcttccgagcccttctgtgggcagcatgggggccaggaatctggcttgttcctgcttttcctatggtggtctgccccaccattattcacacacagaggctgttgggttctcttaccattccctgtttacagagactcagatacattcagaagcgagctaatgctgggtgcccagctctaaggggagaccccagacaactccaatttcctgatgatttctcttcctttacctaattccttctccaagacccttgcagacactgctgtaccaagtggattctgtgtaactctctcagaagtttcctcttccatgaagcctgccttgattacccacccccatcctcactccctcagtgtttaagcccagtgtgtgaacagttaagagacgctatggtcttcccacactggtttcttctcttcatttgggtctcagcgaaatgtatctctgccagattctgaatgtatctgcccctgcccaaccactcacccaccatatccgccatttcctccacggcattgaccactctctcagatgattttgttcatttgtctgcctttacctctagaccaggggcatccaatctttcagcttccctgggccacactggaagaattgtcttgagccgcatacataaaatacactaacgataggtgattagctaaaaataattgcaaaaaaaccctcataatttgtgttttcagaaagtttatgaatttgtgttgggcctccttcaaagctgtcctgagctgcatgcagcctgcaggccacgggttagacaagcttgctctagactatgagcttcccaagggcagggaagacttcccatactcagcactctgttctgggggcttggaacagtgcctggcacatagcaaatatgtcatagtcatctcctgagtgcttgaatgagtggcctttggggtgttttgactagactgcaaaagcaacacttaagtgagctaggctttgcatacattgtttgggactggggaggattccagccaggaattgtcagggggggaggttcaagtctcactgaacatcgagatatgatgtggaagcaaccacccacagagccagaagacaaagcccccaggggagcagaaccacaaagggttgtgttctagtggggagggaggagtggctgagccccgcaatgccctaggctttctgctgggacaaggattataaataggagataaataatttttaaatggaggcaacatcctcactggggcaaaatattatggccctaaattctaggcattcaaatactgggccctgttgtctccctgctgtggttagaggatctggaagtgggaaggtttctggctctggcccaaggacaatattattgtagtcataaaaataatcagagcttggcattaattttggatgatgatgcctccttctcctgacaagccctttatgttttttggtggtgactgttggctgcatcctccaacttcctcaatgagagaccacttgaaaaagaaataataatttgtcttcatatcgcacactccgtctgggctgatggtgggaggggaatgcgtgtgggtgggctcagctctgttagctgcgctggctggaagagattcccagtttttattcagcgctcgagctgggctgcatgcttgctgacaagaggcgggaggccccttagacgtctttagacactccccctgtgctgggctgggcacaggcggctctactcagcagttcagcaggcagaaagccggaaggagagatcagtgctcccaaggctggtgtctcccgtgctgacaacggaggcagtgctgggaagcatgaatctcccagcatctctggatccagaagcctgaaaacaggtggtgctacccacccctccctaagccaatgggcaggaaaaagaatttcctgaacagatctcctcgctgcttaaacacactgctccggtgaacagtccagaccaggcaaggtttgggcgacagatcagaaaaatgaagacctgcacatgtggagctggagcaaggactagtctagtattagctctgtgacgggagagctttgactgtcacctggaagtctgacttgattttgccagcaagaggcaacaaccaaaggttcactttctctccttccaattttgggaggcgatctataggggtttgccagccacctctcatccttgcagaccccaggtggaatttgcaggcagccactatggtgcaaaatgtaattttagtgtttttccgcagacggctgagccaaagacctgccgtggaagagctggagagaagaaatatcttgaaacgtgagtagctggtgattcctctagaggttttccttcacgtgtggtgaggctgttgcacaaatcctgagttcccataacccagcccttctctgcaagcggaatgctccatgctcccagtaaacctgagctgctgctgaattctgaaagcaagccccaaaggaaagctgatatacctagaaacattttttttaatttaaaaaaactcctttcctcttagcataaagatgtttttattttcagggttagtcccatatgtctaagtgcgttaggtttcaagcaggtcttcctggcagtttgggtcggggttcttcatggctatagaaatcacaaagcatgaaccgcatgaacacactagagaaggacacgccccttgcctgttacacttgggaggaataaagcagtcagctcagggaaacggtgaagccatgagaagctttcctgtggctcaggactttgaggttccaggaccctctgttgctcccagccttgcaaccccttgcatttcccgttaggtggacaattatagcatatgctgagcataggtgttcatgagtaacctccatgctctagggcactatattccattaaatattccataaagtcagtgatttaggggtggccaaacctcttgaaaaagtgtttctccaatagttctttatctagtcattttcagtttttaaaacattttccacagaaagtgtcttctaatggcttggatttttaaaggactttttttctctttatgtgatgaatactgcagactttctctgagtttgttttcttatttgtgaacatctttttatgaagttataatggtaccaagctgactttctgtcagaaaataccgcagagccccttgttggtctgggtactgaacttgaattgattcctccctcctttctttgcctcagtgccttcattaactgcctaaaacaatcccctcctttatagattgttgaaaataaccctcagataaagacttcttcattttactttttaaacttaagatatagtgactactgttctatgttaactataccatctctgaggatttaaagaaaagctcttcattgataacatgcttaattaagtaggcagacagaaaagtcaagctgtttcagttgccaaatatttgaatttttaaaaattaagtcacttatttataaagcttgtaagttgcagatgctactaaaagtagcagtccagacttgaaccaggcaagttcaagacacaggaagcaccacattccaagtagcctgctgtcagcaacaggaagagagtactacagcccagacctttaacccaggaaccatgtcttctttcagtagcagcctcttccttcctatcgtgggcaaccaggtcttcccatcagcaagtacttctaattgtgttaatctttggaaataaatatcagagccttagaaatagaactatctttggtgaatagggagctagcaaatgcataactgaaactgactgcccttaccttcagtgcatgaaagggaaaatgggtttcctctgcggtggccatggcaatcccgccataaacactgtgccttcatcagtgaatgtaggtttgtccttagctcggaagccctctctagtgtcctgagtggaaggacctgagaattttactgctaggtttgtggtgggtgtttggttttacttttgttctgtggagatgagaatagggtaactatatatagcctagtatgaaacatcatactcataggctctagatacacaggacttcaagcactcatactgtattgtattttcttcttgtaaccaattcttagaatatcacttttgtatttgcttcaagggggaactcatgactaactgcagtcatatctgaggagcactcaaaactccgcccatataacactataacgtggatagaaaagcagaagagcaggggtccctttatatggtgatggtaattctttattaggcccaatctgtgccagggactatattcagtacttggtatatattccctcatttaatcattgcaacatatttgtgaggtttgcactttttaataaatgaatattgggaaaaggatagcactagagttcaaccccaggtctgcctaactccattgcccatcttcttaactactgcatcagaagcagtaatacatttctggatattcatggaagtctcaggtataactgtccaagctgctggagctatttccagaaaatatgagtatagcagtcctgattatgggtcccttgctttgtataatgcagagggtgttctgggtctggaaataagaaatccataaacatatcactaaggggagctcagaaggggaggtctgtgggcttaggctaacagggaggacttcttggaggaggtctccaacagagcgcctggcacaaagcagcactctgacaggaactttcaaagatcagttctccaaagaccctgctggtgaccttcgtagtaattatggcatttttcaggattaaaaaaaaaaaaaagatctgactttgtttcaatcttttcacatggaagctgcacttgggagctgcccatggcctattttaaagaaatctgaaacattttacgtcacgtaaatccctcatggcttgccttgtctggacactttcacaatgtctctctaattgtatcagctttctgatgataccttaaaagtatggtttcttctggtttctcacttgtataaagaattaagcagaaagaggatttcattaccttttctaaaacaccctaatccaagatgactcacttaaaaaaaattactggaaagcacaatatattaaactctcatataaccaatcccacaaatgtataaatatttgaaacgcatcttttacataaaggcagataatgtgaaattgtgttaattgcaagtggcaggatttcccttaccaaaacctaccagtgtttctaggagtgctgattgttgaaatctctttcctaggaatggagctatgttcaggtcagggacataaggctttatttagcaacagagaacaccagaaataggacagccattatcttgtatcccagggggaagcttacgttttatactatatctcagcactttcgtctatttttggcttccaagggtaggtgcgagcacagcttgaatgttaatagtcacaacttaccaagcaaagctaattttgctgagggacttgggctcctttaaaaggcactgtcatataacagtgttcacgcttcagcaatggagagtcagcgaggttcatagatgtgttaagatttgaaatatagtctgaacatataaattccaggcaagcatatgctgcccaggagctgaagaaggtgttccatgttttatgttggttaaaaagtctgtacgcttattaaggaaaaaaattagtggcagtgctatttatattgaaatgtacatatacatttatttacttagtctactacagctttttttatgtggcatctaagtgctagatgtaaatataaagatatttggggagaaagacagacacagaggtgtctacttccttaaacaaacagcagccatatctgtggttgtttctaatgcacagaagggctgaggagaccaggttgggatgacagcaaagctttgcttagtacaagtatttctgtgtaatgagaccatgatctcctgagcagtgactgacaaagtgggaagaaaacaccatgagtgatgtggaattaacttcagctcccagaaatatggatatcttgggaacacttccctgctgaagagaagaacgtttcaacctgtttctctttgttattttttttttcctattttaatctttcacagaaaggaatgatcagacagagcaggaagaaagaagagaaatcaagcaaagattgacaagaaaggtagtataagcattttattgcctgaataataaaaggtggtctagagaacagctgcttcggtagcaggtgggatgggtaatgctaggtatcactctgtgatcatgaataatgttctcctggacatcatggcatcagttaaatcaggatatttgctcagcaacaatgaattaactccctctgacgttccctatggacgaagtccttccctagcacggtagcacttggagaggtgcacaatgcacatgacattttttacttatgttcaggtggaagccagaagttgattggcattttcttaatttacagtgtctaggaaaagcatacctgggtatcagtgttttagtcacattttacactcatcgcttttgttcacctccaatatgtctagaagttcctcagttgcagaaagctttattagactcaaaggtttgttctctgtgactcaaacagttaacatttactatggccaatacaggtagcaactctataaatcttaatctacttttaaagccttgaccatttctaaattcaagtgttctggattccccttcttcgttgtgctgctccataataattctcttgaaattaacagaatatccttcctaagctggacatataataactttattagtacttttaaaaagcttatctaattgtatctgaagccagtgatgccataaaatctaagttaattcactaaccattccttgagctggtgctatgtactactgggggtgtgactccttctgataaaatatgttggaggaagggggattgtgatttaagagtacagtatataatttcagcccttcacattagagattgcttgtatttgggttatattttccagtttcaggttttttttgttttgttttgttttttaagagaagtgctgtttgttcagagtacttcaaaaaagctagtttggcatgtgatacttaactatgatgatctttaattttagcttaatcagagacccactgttgatgaattaagagacagaaaaattctgatacgattcagtgattacgtggaagtagcaaaagcgcaggactatgacaggagggcagacaaaccctggacgagactgtcagcagcagataaggtacctaactgcctgtgctggtggggggtgttggatgatataataaaggcaaaatatgtcatgccagggagtttattcatagacaatgggagccctcaactatttaagggtatactgcagtaaatattggtttctcaaagataattcagggtcagattgagaagtggttctcagctaggtgacagttttgccccgagggacatttggcaatgtctagagacatttttgattgtcacaactcgggatgctactggcatctcctggtagaggccagggacactgctcagcatctcacaatgcacataacagcccccacaacaaaggattatctagtaccaaatgtcaagactgtggaaattgagaaaccttggtataagggataaatcaaaggtgggcaaggctgccataagagatcaactgacaagtttaaacaaaaagagctacagtggggacaaagaggcattcaagaaagcctctacagtatagaaaaggttctagattctccccctggacttgtgcagtttgaggtatctctgagaacctcctaagaagtctgaactgaacagctagagaggcaggaagaacacaaggaggtagtaggtcatagagtctctgcatgacatttggtgagcacagagagggtcagttcttgtctgtgatcaaacacttgactggcaagatttaagcccaagagtgtccatagagttttgtcaccttcttgcttctattaattttcagaagacttaaagcctttaggaagagaaaaattatacattcaggcaaggaatttgctaattgttcttcattcttcatatgctgagtatgagtatgtacacagatattgcatcaacttggagaaatgtgaacgtgttggactaacttgcctggttctttgtgactgatgtgcccagaggatcacagtgatgcgaggagaagtatctttggtggtctgcagatgtgtttgagtatgagaataatatacccctaaagttcttaaagactttccttgtcccagaggctgtgtttgatgttttcagtctcatcaggtccctcgagtgtttatctgagaaagaagtacatgatgcaagtgggcctggggaagccaaaatattaatgtatgctgaagttagaaaggcttatttctagattatctctgattataaaattccaagttcaccaaaagctgaagtttactcattatcttggtgttcctgtttcattagtgccctaagcatgtgcttggtccgtttaggtatggagtgaacggagtttggggaagggttgtcttcccactacagttcagcaaattaatgaatggaacacttacataatactagtcctagccagagcaatcgagcaacagaaagaaagggcatccaaactggaaaagagaaagtcaagttatccctctttacagacaatatgatcttatacctagagaaacctaaagactccaccaaaaacttagatctgataaattcactaaagccataggatacacaaaatcacacaaaaattagtagcatttctataaactaataatggactagctaagaaagaaatcaagaaggcaatcttatttaaaataggtaccaaaaatacctgaaaatgaattgaaccaaggaggtgaaagacctctacaaggaaaactacaaaacaatgatgaaagaaattgaagaggccacacacaaatggaaagatatctcatgctcatggatagaaaggactaatactgctaaaatgaccataaaatgaccaatgcaatccctatcaaaataccaatgtcatttttcacaaaaatagtaaaagccatcctaaaattcatgtgaaacccaaaaagaacctgaatagccaaagtaatccttagcaaaaagaacaaagctggaggcatcacactaacttcaaaatgtattataaggttatactaccagcataatattggtataaaagacacatagaccaatggaaaagaatagaaaacccagaaaaaattcacttatttacagccaactgatttttgacaaaggtgccaagaacataaactggggaaaggacactcttcaataaatggtgctgggaaaattggatatccatatggcaaaagaatgaaactgtacccctatttcttactatatacaaaaatcaacttgaagaataaagacttaaatgtaagaccccaaactataaaaccactaaaagaaaacacagaagaaacagtccaggacattggtctaggcaaacattttatggctaagacctcaaaagcacagatagcaaccaaaataaacaaatgagactatattaaactacaaagcttctacacaacaaatcaacagagtaaagagacaacagggaatatgagaaaatattaatatctgcaaactattcatccaaaaagggactaatatccagaatatacaaggaactcaacagtcaaaaaacaaaacaaataatcccattagaaagtagacaaaagacatgagtagacatttctcaaaagatgacatacaaatcgccaacaggtatatggaaaaaatgctcaacatcattaatcaacagggaaatgcaaatcaaaaccacgatgagatatcatcttattccagttagaatagttattaaaaaaataaaaacatgctggaaaggattaggagaaaagtgaacttttatatactgttgatgggaatgtaaattaatgcagccattatggaaaacagtatggagactcctcaaaatattgtttaaaaactatatgatccagaaatgccacttctaggtatacacgcaaaggaaatcaaatcagtacattgaagagatatctgtactcccctgttcactgcagcattattaacaatagccaagatacaaaatcatccaagtgtccatcaatagattaatggataaagaaaatgtagtgcgtgtatatatgtatatgtgaatacagtgtgtatacacagccacacaaaatggaatattccaccttaagaaaatccagtcatttttgacaacatgtatggaactggatgttattatgttaaataagccaggcacagaaaaacaaatatcgcatgttctcactcatgtgggatcaaaaaagttgatgtcatggaggtagacagtagaatgatagataccaaaggctgggaagggtggcagggtttggggagagaaagagaggttggttaaccagtagtaacatacaattagaaggaataagttctaatgttctatagcagagtagggtcactacagttaacaactatgttgtgtatatttcaaaacagctagaagagaggacttaaaatgttcccaacacatagaaatgataaatactggaggtagacatcctaaatacttgatcatcacacagtctatgcatataacaaaatatcacatgtaccctgtatatatgtacaaatattatgtatcaataaaatttttacaaagacttccagaatattagctacatactagcttggtaggactataataatgagtatggcagttttaatgatgaaccaaaaaattgtttgtttttttctgtatattacataatagagtcaacaaggattaggaatggttaatttataaacacgatgctaatttcctgatttttttaatatcctgtaaaacaatgtcttgtttttaaatttcaggcagcaattcgtaaagaattaaatgagtacaaaagtaatgaaatggaggtacatgcatcaagcaagcacttgacaaggtcagatttgtttctgtgaatttcatggtacttatttttgaaacacacaccgccttcccccgtcccccgccacaaaccatgtatccagctatacaaattcagcatttttccagagaactctattgaacaaatagaatgtacctcaagtaagaatgctgcctgctcccattatttcctttaggacttggtgaaaggtgatatgtatggtaacaatatcggtttatttaagtagttaatgcatatttaacaaaaataagcctcaaggcaatgaaagtaatttttctgtgtatttaattcccctctaatattcagaattcctccaatttatagaactcacctgtttatacttacagatttttgtgaaattagtcactccccaccttcacatttactttttcctatcgtaaattattagtcacatctttaacacagccagcgttctcctaaagctgagtatttgtttcctcagtaaatatttgagtaagtgctgagaatgcaatagtgaatatgataaaggaggctcccatcttcatggagtttatgtcccattgggaatatattggctgattctcccataatcaagacttttcccattaagatgaatatattctctgtctatgctatgatatgcaagggatgacactgggcttcttagtgatgacgaagttgggaaaagatttaactctctttacttattgaactgcatattttttcagtatttccccccacttcttttccatggccatgaccggtagtaattatgtgaagttctcaaacatctctgattctaaagcagatgactgtgatgcaacaagccttcaactgtatcagttgctttgtcttctcctttatctgaagatgctcaaggcccacatacaaagagaaaggaaatcctgcatatagatactgccttaaactaaaataatagctttagttttctgtttgttccaaagtggccactgcaattgttatctgaaagatttactctgtaagattaatgtggctatagaacagaaactaagtacaatggaattccaccttaaccaatggttttagggtgaatatatcaaggggaagggaaagttggatgaataggaaaaaattatgcaaagagtttgttttttaaggttccctcccatgactaacatacttttggggaggaataggtcatatggaggaataggtcatatgaatgtttaggaaaaacagtttcagtaaatcatgcacaattacatttaatgttcattctgtcttaaatagaatgaatacatattctatatattgcaatctcaattttgtacattttccgattatacattattaaatgtttagtaaagatgtttattgtcctaagttgatagctttctaaaataatgactctaatacttaaaatgtggtataaagaccctaaaattatttcaacaattcaagagtcagaacggtatttttggttatgagattttaagagttttaaaattactatgaacatattactctacaaaaagtcataactctactataattttcaataatttattaacaaattcatcatttctactgatttagcaaagccctggcctttctgtgtacttcaagggcttttaactcacaggtttaaaactaagttctagatagtcctaagaattcagcatataacaggggcctgagagtggggagccctctgagactctaccctattttaaccagagtagctccatcctcatgttttacatatgggacttctgagaatctttttaatagcagcaaatttatttgtataaggtttttggctattttaactgctagaaatgaataaccttaaattctttgtcttttttataatctctagattccacaggccatagagattttcttctgagaagaatttgtgtttaattttttgataccaacactgaacattcatcagggaactttcctgaagttcagctcaagactaccctacctgctgtgtttgtgagaagagtaggatcacacacacaggtgcaatcttgaccacacttacctgcaagaggagtaaccagaggacacacttccttccttctttggtgtctgaggagtgtgaactgttggggtcagttaagacccaacataactctatcagaagaaaactgttgtttgcctttcaaccttgttttacagttctgcagtgtaatggaggacgggcaacgtgcatgtgcaggctcaccactcccaggcctctgacatgagggacatgtgacagtgtcattcagtattatgttcaaaagacatttttatcctgatcataattaatttgaaaactctttaagttcatgttatacaagatgatttactgtattatacttttccttttttatataatgtctaacaaaaaatacagctgcaacattttgattcctgttaattttgttctttaattaaatgactacttattgcaggaaattaacccaggctttacattttcttgtggttgggatgagtggtactttagaacagggatctgtgaaacaagtcaatttttacttgtgaacgatcagaatccaaacacatgaatgagaattccaactttttatgtgtttggtttgtgccttagaaaatcaaattgagtgcctttaaccaagaaataagcaataatttgttgaaaaattctatcaaaatgaaaagtatgcctctttagagtatttttaagctcacctctgcaaacactgttaaagaaaggaaatttaccccagcacaaaggtgaaaatcttggcacaaagggggaaactaacaatacatgttccctgaaaaatatttttaattggctttcaaataagtgtccttacagagatgagccttccctcctccttccctcctggtatactggtgaggcaggaagcacagtaacttggagcatgactttcagagcttgcagaacttgtgcacaaatccaagctctgtgctattcaacaagttacttgttttttctatagtatggtcatatctctctcacacaacattgctgtagtatctaaataagacaaagtagctaaagtgctggcacattgctgaggacgttctgggaatccaataaatgttagctactgatatggttgccaggtagcacctggagcaactgagtgtcctctatgacttcttgccacatatgctacctcattgctttccactatttttccttttctacttaagactgctactgggtcagacgcccacagaaactgccaagtctttatgttagcactttgtccaaagtgacttatgatcagtcctagagactagcaaaacacactattcattgaattatagttttttttaataagaaattgttatggtagaaaaattccagctctacctcttagctgctctgtaaccttctgtgaatcagttgacttctctgagcctcaatttgtttgtgaaatgtatctaaatcctttctaattagaagtcagttaaatttaaaggatttgatatatatatatatatatacattatatattttctgttattcataacccattatttgtagccaaaactttacctcttttctatcttaagcaacatattagaagctctctgtatttaatattcaatttaaaatattaatgggagcccaaattatgtaaaactaagatttcaatttccctcacatagaaatattaatatatttactatgaaacagaaaaggaaaaggtgctactgtttagaaaccaccttggcccccaaagtacaaaagatcagtactgcttaacaaaagaaccaggcagatcctatagttagaaatgacctggttagatgggacatatatttagttttttccccaagtcccataactagtggataataaaactaaaaaggtaaagtgcaggataaccaaaggagggtttggactggttcagactcaaaggttctaagatatcctaaaaccagcagacatattcacttaaatcaaaatttgtggcaatagtatctaacttctaccattgtgtttttattatgcacaaactattactctatacttacatatttcatgttcttatcaggtattataagggttaagagataaactaaaattgaatcaagtatatttactctccacctgcacatcacaactatcaagttagaggaataaaattaaaaagcaattcacaagtcatattacactgatgacatacatgtatatgtacacgcatttgcatatatttataatttgaagagaaagtttatatacttaacagccaacagatttagaaaaaactatttgtcctactgaataacagtatatatgaattatcagaattcttcattactagtattcaataatgagctttttatgcaataaatttacaaatcatttgcccctattttcagaaaaaattattaaagcaaccatgaatatttaaatcataagttctgtttttaaggagttcaaaacatttttacaagcatgttagtaatttagtgagaggaaattaaatatcttctagaaacatctagtaacttttaagctaatgtaatagaggaaatactacattatatgactttgtaaaaagtatttctaaaaaaatttaaagggggctgggcatggtggctcatgcctgtaatcccagcactttgggaggccgagatgagtggattgctttagtccaggagttcgacaccagcctgggcaacatagcgaaactccatctctacaaaacaaaaaattagctgggcatggtggtatgcgcctgtagtcccagctactagggaggctgaggtggcaggatcacttgagcccgggaggttaaggccatagtgagccgtgattgcaccactgcactccaaccagggcaacagagcaagaccctgtctcaaaaaatataaaaataaaataaagagactttgaaatcatatcacctaagtaattttttgacaattgaaatggtggtgggagcggggaggaagaacctaacatcaagacatccaccttgtggaaagatatggtaattacaggcctacatttattatacattggaagtaaagtcaaagtttttagctatgtacctacagtccttcaacaacaaattcaagctcagaaatgcaaaatcctaatcgtactattaaaactgctattactatatgcttccgatacccatttgtctagtttttttccagagacctttttctccatttttcatatgaaaacatctcagaagatattcgtaagcaagtgaacatatgaaactgaatatatgaaaaatattttcaaaaagtagatttctataaatcccatttgcttatttagctgcaaatttatttacagtgatgatactaggaacatactactagttcaaacaaaaaatgtttgttcgaatgaacaacagaaagtactggttagcagttccatagttctatgaaaatagagcagtatttttaaagtaataaaaattttcttaaaaaaccttttcaaagtttttaatctcaactgtaaatcttaaagatataaatggggaaattctaaaaattcagttttcttactaagcaatgggaggaaagaaatctggatatatggtacatatgacaataatttaatgtttcaagttgcagacatgttacatatgtgtattattcctttctaaatgcagtttattatcccttctcaaaaatacatacactgaatgtattactacaattcaggtgtgttccctaaaagactggtctataccaccagtccattctctgctttccagatagcctacttcttaattataatggtgacacctgatgtggcagaaagcacaatctccagaaccacctatcatcttgcttcaatttttacattccaagttagatttgtttgttgatattatttgctggtattttattttgctcaaaattctacttgtttattcatagcatatatgattcttccatactttaagttttaattagataagaaacttatacactaactgtatgtggtttaactgttaataggtggtaacagaatggttaaagaactaactccagcaactgtgaagctcaacactaggcactgaactcagagttggcagaatttgtcactgtagactacaaatttcatgttgaattaaatgctgtatgaaaaccactccatctattattcatttaaaggatctgctggccttttaagttggtgttggccatccataatactacgatttggtggcaatgagatcactacagtaatggctgtagaatttagtatttaggtttctgcctagctatactaacgtaaaatttcttctcttccatgtccttttccatgtgtacttctgggacagttaccaccttacagctctatttggttgaggacatgcggtaaacctacaccagggtgttagattacaatccaggtaagaaatttaagtcattagctacaatgatcatttatttttaatatgtttaaaatagaacaatcaagaattttagctatattaattaatatactcattagcctctgctatgcaaaattgatttaaatcactatttctgtgaaacagtaagataaactaaggaaaaattttataataaagaacagagagttctgatctataagatttcccttccgaacttgaagtctgcaaactacagcccacagaccaaatctggccagcccctgcccttttagtggccagtaagctaagaatggtttttatatatttaaatggttacaattgaaatgattataataagcaccgacgtgatactctgaaatttgccttctgggccacaaagcctacgacattttctgtatagcccctcaggacaaactttgctagatcttgctctgaacttaaaaaatttaaataaacatataatagaacattttagaaatgaattacacagaagtcaaatagctaaattgtttttaaataagcttaaaaccttttaacttcaaatctattccaaatttcaatactcatttataaacccaattgtctttgtatttgacttgtacaaaatgtacatcaaattaggtaaataaagcctcatcattattaaaggcaagtgtttcattagtgtgacttccactcctccaagttccttttatttaaaattgttgctatcacagcataagctaaaagtatattatctaaagctcaagatggtacaacatattgatgtcactcaacacacctgtattcctaaaatgttgttctcctgtagacgtcaattcagaatattttcatgcgcctttaaatagaaaaactaaagctaaccattacaaatacattgtcttaacaatgaagtctatgtacatttgatttgcctatatgattcctctaagggtccaatgaaatggaaatctgtatgattctgcatgacattaaaagcacacatatcctcatttttaagtagggagttcatctctgttttgaggtgggcattctggtgaaaactgaaaaacctgctagacatattctaaaagagctgtaacaccatggaagggttcatttattactcatttgtgtatctagacttgagctcagtgcatatcatataatagatgttcaaatggctggttaatactttatcaattacaatgaaaatgctgacaccatataggacttgaattttaggagacacattagttcgctttgaacttagtaaattcctacttaaaactgccgtattggccgggcgcggtggctcacgcctgtaatcccagcactttgggaggccgaggcgggtggatcatgaggtcaggagatcgagaccatcctggctaacaaggtgaaaccccgtctctactaaaaatacaaaaaattagccgggcgcggtggcgggcgcctgtagtcccagctactcgggaggctgaggcaggagaatggcgtgaacccgggaagcggagcttgcagtgagccgagattgcgccactgcagtccgcagtccggcctgggcgacagagcgagactccgtctcaaaaaaaaaaaaaaaaaaaaacaacaaaaaaaaaactgccgtattcattactttgttcattcacattgttgtaagcctacttttccagacactcttttagcttctgaaaattgtgatgaataagacatacaagtttcctaccacacagaatttacagaagtggagtttgtggaggcaaggcagaaataaagaaatttcagataccaaaaactgctatatgatagacagaaatagtaacattaattggatggtgagggaagtgctctctaaagaattaccacttaaatggacacgtgaaaaacagcaagagtttccaggaaaatggaatctcaaaaccaaagagttagaaaaaagtgagattgttcaagtaatgcttgaggcatactcaacaaggcggaaaggagtacaaaataagggtaaagggaggcagaggtcagctcatgtggggccttctagcccgtgatataaaggcttggttttaataagttttaataattcagatgaaaggcagattaataaaataaggcatttaaagtagtataattctgtggcatttagtacattcacaatgttatgtaactaccacctcacctctatctagctccaaaacatttcatcacaacataacttttaagcagtcactccccattcttcctttccctcatcccctggcaaccactaatctgctttctgtccctgtggatttacctattctgggcatttcatataaatgaaatcctaaaatatatgacctgtgtgtctcattctttcacttagaatgtttttgaggttcatccacattgtagcatgactatatactcctttccttttatagctgaataatattacactgtatggatatataccacattatgtttatttatcatcagttgacagctatttgggttgtttccaccttttgactattgtgaatagtattgctgtgaacattctcatccaagtgtttgttcaatctgttttcaattctgctatattttagatatctgtccctaccccaatctcatgttgaattgtaatacccagtgctggaggtggagcctggtgggatttgtctgggtcacgggagtggatccctcatggcttggtgctgtcttcacaatagtgagttctcacaagatctggtcatttaaaaatcagtggcatctgcccctgcaactcactctcttgcttgctcctgcttttgccatgtgacttgcctgctttctctttaccttccaccatgattgtaagcttcctgaggcctccctagaagccaaacaagtgccagcaccatgcttcctgtaaagcctgcagaactgtgagccaattaaatctcttttatttgtaaattacccagtctcagatatttctttgtatcaatgtaagaatggactaatacagaaagttggtactgaggagtgggacattgctataaaggtacctgaaaatgtggaagcaggtttggaactggttaagagattagaagagtgaggagggctcagaagaagaaagaaagataagggatccatatgaactttaaagtagttttttccaattctgtgaagaaagtcattggtagcttgatggggatggcactgaatctataaattaccttgggcagtatggccattttcatgatattgattcttcctacccatgagcatggaatgttcttccatttgtttgtatcctcttttatttcattgagcagtgatttgtagttctccttgaagaggtagttcatgtcccttgtaagttggattcctaggtattttattctttgaagcaattgtgaatgggagttcactcatgatttggctctctgtctgttattggtgtataagaatgcttgtgatttttgcacattgattttgtatcctgagactttgctgaagttgcctatcagcttaaggggattttgggctgagacaatggggttttctagatatacaatcatgtcatctgcaaacagggacaatttgacttcctcttttcctaactgaataccctttatttccttctcctgcctgattaccctggccagaacttccaacactatgttgaataggagtggtgagagagggcatccctgtctcgtgccagttttcaaagggaatgcttccagtttttgcccattcagtatgatattggctgtgggtttgtcatagatagctcttattattttgagatacgtcccatcaatacctaatttattgagagtttttagcatgaagcgttgctgaatcttatcaaaggccttttctgcatctattgagataatcatatggtttttgtcattcgttctgtttatatgctggattacgtttattgatttgcatatgttgaaccagccttgcatcccagggatgacgcccacttgaaaaagagcccgcattgccaagtcaatcctaagccaaaaaaacaaagctggaagcatcacgcctacctgacttcaaactatactacaaggctacagtaaccaaaacagcatggtactggtaccaaaacagagatatagaccaatggaacagaacagagccctcagaaataatgccacatatctacaaccatctgatctttgacaaacctgacaaaaacaagaaatggggaaacgattccctatttaataaatggtgctgggaaaactggctagccatatgtagaaagctgaaactggatcccttccttataccttatacaaaaattaattcaagatggattaaagacttaaatgttagacctaaaaccataaaaaccctagaagaaaacctaggtaataccattcaggacataggcatgggcaaggactgcatgtctaaaacaccaaaagcaatggcaacagaagccaaaattgacaaatgggatctaattaaactaaagagcttctgcacagcaaaagaaactaccatcagagtgaacaggcaacctacagaatgggagaagatttttgcaatctacttatctgacaaagggctaatatccagaatctacaatgaactcaaacaaatttacaagaaaaaacaaccccatcaaaaagtgggcgaaggatatgaacagacccttctcaaaagaagacatttatgcagccaaaagacacatgaaaaaatgctcatcatcactggccatcagagaaatgcaaatcaaaaccacaatgagataccatctcacatcagttagaacggcgatcattaaaaagtcaggaaacaataggtgctggagaggatgtggagaaataggaacacttttacactgctggtgggactgtaaactagttcaaccattatggaagtcagtgtggtgattcctcagggatctagaactagaaataccatttgacccagtaatcccattattgggtatatacccaaaggattataaatcatgctgctataaagacacatgcacacatatgtttattgtggcactattcacaatagcaaagacttggaaccaagccaaatgtccaacaatgacagactggattaagaaaatgtggcacatatacaccatggaatactatgcagccataaaaaatgatgagttcatgtcctttgtagggacatggatgaagctggaaaccatcattctgagcaaactatcacaaggacaaaaaaccaaacaccgcatgttctcactcataggtgggaattgaacaatgagaacacatgggcacaggaaggggaacatcacacaccagggcctgttgtagggtaggggaagggggagggatagcattaggagatatacctaatgttaaatgacgagttaatgggtgcagcacaccaacatagcacatgtatacatatgtaactaacctgcacaatgtgcacatgtaccctaaaacaaagtataataataaaaaaaaaagataagggaaagcttgcagcttcttagagattggttaagcggttgtgaccacaatgctgatagtgatatggacagtgaagtctcggttgaagaggtctcagatggaaatgaggaacttacaaggagctggagcaaaggtcacacattttacgctggatgcattctgttcatgccttagggatctgtggaagtttgggcttgagaatgatgacctaaggtacctggtcgaagaaatttctaagcagcaaagtgttcaagaagtgacgtggctgcttctaacagcctatgctcccacgtgggaacaaagaaatgactcaacattggaaattatatttaaacagaaaatggagagtaaaagttttgaaaattcacagcctggctgtgtggcagagaaagaaaaagctattttgggagaggaattcaagcaggctgtggagcaaccacttactagagatagtggcataactaaaagggaaccaagtgctactatcaagacaatggggaaaaggccttgaaggcatttcagagaactttcattgcagcccctaccacaaggggcccagaggcctagggtggaagaatggtttgtaggccaggcccagggcccatatcctgtgcagcctcaggacactgctccttacatccctgactccagctccagcctcagctcaaagggccccagatactgcttatgccaccactctggagagcacaagtcaccgtaagccttggtggtttccacgtggtgttaagcctacaggtgcatagagtgcaagagtgaatgaggcttggcaccctctacctagatttcagatgtatgagaagtgggacatggagttaaggattattttagagctttaagatttaatgactaccctcctgggtttgggacttgcatggtgcctgttgcccctttcttttggctgatttctcccttttggaatgggaatatttacccaatgcctataccctcattgtatcttggaagtaagtaacctgcctttgatgttacaggctcatgggtggaagggatttatttgccttatctcagatgagactttagacttgggacttttgagttaacgctggaatgagttaagactttgggcaactcttgggaaggcatggttgtatactgcaatgtgagacgcatataagatttgggaggggccaggggtagaatgatgtagtttgaatatttgtccccaccaaatctcatgctgaattatcatccccaatgtgggaggtagggcctggtgggaggtgtttgggtcctaggggctgatccctcatgacttgatgctgtcttcacaatagtgagtgagctctcatgagatctggtcatttaaaagcgtgtggcacctcctcctctctctctccctccctctcttctcttgctttcaccatataacatgcctgcttcctcttcaccttccctcatgataagctttgtgaggcctcccttgaaggtaaacagatgtcagcaccatgcttcccataaagcctgtagaaccacaagccaattaagcgtctattatgtataaattatgctgtatcaggtatttctttacagcaatgccaaagcagactaatagaaattcttttcggcatatacctaatagaattgctgggtcatatggtaactcttacgtttaactttttgaggaaccaccaaactgttttccactgtggctgcattcttttatactgccccagaaatgtccaagagttccaatttctccacgccctcaccaaaatttattgtttttttgattctaggtatcaagtggggataaagtggcatttcattatggtattgatttacatttccctaatgactaatcatgctgaatatctttctgtgtgcttactggccatctgtaggtcttctctgaagaaatgcttattcaagtcctttggccatttgtatttgggttgtgttttgttgtttggttgtaacacttctttatatattttgaatactagactctcagagatacaatttgcaaatattttctcccattctgtagggtgtctttccactttttgggagtgtcctttgatgcacaaaagttttgaattgtgctacagtccgatttatctaatgtttcttccattgcttgtatctgtatcatatttaagaatccactgccagatccaaggtcataaagattgactcctgcatttttttcctgcgtttcagagttttggctcttacatttaggtctctaatccattaatttctgtacatgatctgaagtaaggttccatcctcattatattgcatgtgtttgtccaattgtcccagaacaatttaagaaactatactttcccccatggaatggtcttatacccttgatgaaactcaggtgaccatagatgggtggatttatttctagacacacaattacattctattggtctagaggtctatcattatgctagtaccacataatttcaataatgtaggtttgtcgtaaattttgaatttgggaagtatgagttctccaactttattcattagagttttttggttatgctgggtctcttccattttcatatgatttttagggttagcttttccatttctgcaagaagaccattaggattttgatatggattgtattgtatctgtagtctatttcagggagtattgccattttaacatatcaaatcttccaatccatgaccatgggattacctttccacttatttaggccatctttaatttcttgcaacaatgttttgtagttttcagtcttatacctcccttggttaaatttattcctaagaattttaatctttttgatgctattgtaaaggacattgttttcttaatttcatttttgtattgttaatttctattatatagaaatacaactgatttttctgttgatcttgtatcttgcaactttgctgaatttgtattagcttctaatgattttcttgactctgtaggattgcttagacataagatcaaatcacctgtaaggagaaatagtttcgtttctcccattcccacttggaaatctttttctttttcttgcatcatttctagatctagctacaacttctagtacaatattgaatacaagcagtgaaagcaggcatccctgtcttattcctggtcttggcagggcaggggggcttttagtatttccccattgagtattatgtaagctatagggcttcatacgtactctttatcatgttttggaattttccttctacttccagttttttgagtgttattataaaagggtattggattttgtcaaatgctttttgtgcatcaactaagaatatttctttttcttccctcattctattgatatggtatattacattcattttcctatgttaagccacccatgcttggctgggataaatccatttggtcatggtatggaatgcttttaatgtgaagctggatttggtttgctattttgttgagggtttgtgcatctatactcacagagaatattagtgtgtaatgacgccattgtgtggtttggaatgttctctcctcttctgttttctggaagagtttaagaaggactgggctgggcatggtgactcatgcctgtaattccagtgatttgggaagccaaggcaggaggactacttgaggccaggagttcaaggccagcatgggatacacagcaagaccccattctctagaaaatattaaatagctgagcatagtggcacgtgcctagagtcctaagcttacttaggaggctgaggcaggaagatcacttgagcccaggagtttgaggttacagtgagctaagatcagaccaacatactccagcctgggtgacagagtgagactctgtctctaaaaaataaataaataaatttgaaaaaattaaaaaaactggcattatttaaatgatagaattctttgttgggaggttttcgattactaattcaacctctttacatgttataagtctgttgatattttttatttcttcttgagtcggtgttggtaatttgtgtttttaggaatttatcgatgtcatctaggttaactaatttattgatatataattattcatagtattctcctagaatcctttttatttccgaaatttcagtagtcatgtccctaactttcatttctcacattagtaatttgagtcttctgtttatcttagtcagtctgctaaaggtttattttcttgatcttttcagaggaccaaattttgtttttattgattttctgtgttgtttttctgttctgtttatctctgatctagttcttcattatttcatcgattctgacagctttaaatttttctagttctttaaggtataaagtaaggttattgatttgatacctttcttactgtttattgtaggtgcttacagctataaatatccctccgagcactgctttcaacggatcacgttttggtatgttgcattttcatttgtcaaagtattttctgatttcccttatgagttgtcccttgacccactggttaagagtgtgtgtcactggagagttttatgtaagggagtgacatggtatgatttatgctttagcaagacagtgttggctgctaagtgaaaaaagtgtggaagggaaagtataaatgctgaaaagccattgtaagaggccgttgaaattgtctgtgtgagaaattatactgacattgtcacagagacagtgcaagtggcagaaagtattcagatgtgggtcatattttggcagtagaatctataggaattgttgatgaatttactgtttggctaaaaggaaaataattcaggaattactgttaggttttggtttgaatagttgggtagttaaaagtaacttcattgagataggaagacaaagtttactttttctttgatgaagagaaagaatggtaagggagacaaatcaagttattttgagagttgagattcttattagaaacgtcaatacagcagtatttataatgttctgatgtccaaagtgaaggtcagaacgtttataaatttgagatcatcaacacagaaatagttattatatgggactagatgaaattacttaaggtgaaagtactgactgaggaaaagaaagagactaggaatgaacccaaggaaaagacacagaagagtagcaaatacatgccagcagaggattttaagcatgaaatgccactgagaggctatgttgccaaatctaatctgtttttacttaaatgactgttgattttgataaaagtagttttgatgaaatagtaggggcagagctgcattgagggaaggaagcaaagaagttgagatagtaacctgagaagattattctgatatattctctgtaaaagtgaatggataattatatgggtagggcagtggtttcaggagaacttgatgtcaatggaagcctatttatttacttatttacttatttaattaacatggactataaaaatcaggagaggaaaatcaaagataatgggattaaaacccattaatcactagtagggtgattgttcttaaataaacaaatctgctattggactgaaagagaaatcagaaaatgctggtcttgatgcaggaaacatgttagattttagggtgaagatgagaaaattatgaggttagacaatcagctcaaaggtaaagaatcaaggaaagaggtatttatatgcaataatactctggaaatgtggtaaagccaattaaagagagcagagtaaggactgttgagcaatgttgagtgcccatttgaagtacgtggccatacatttaaagcctgattgtattattttctcctgtgctgttcaattggtagaatgacagctaagaattagtggataaggttgacaggaagagaaagggcaagagagtattattttgaactctggcatctagaatgggtaaggaaggaaggacagacaagaaggtaacaggaatagagaaaaagtataaatagcctgagactactatacaaagcaagttggaaagataggctggagtgataatgttggaaattgaggtttagaggggcacaactgctggtaatgataggattttagaagagttggaaagaataaagaacctgggatggattacacatatagtacagtattgaaatcaagtatgaggtatgatttaggagtcttggaaatttggctgacgatgaggtaaacagggtgataagacatgatgcaattagtctcacagggcaagatggatttgcaagtcctgagtggtatttaatattgtaacgctgtcactctcttaaaatagcaaccccgctactctatcaataaatcttagctgatgctaataattgcataaagctgaccaaaatgagaagggttttaagaagccagttttcccactgtttaattactggtattatttttgaataatactctgctaccattaaatagacaagggatagtaaagctacttagcattatactttggatcaaataaatatccttcttcagatacccaatgttcacaaaataggaatataatgatttatatttattcaagtgacataagcatttatttcaacttcattaaaagcaaatcaaatgtatactcatttttataaattaatctagcaagatattacaatgactactagattaaaagtatttgtcaaacagcctggttatgaaataggacttctatattgaattaacatatttaggcaatgtagtagcttttttaggccatttagtgcttcctaatacattagagccatatctgaataaatgtttccaacagtgtgctgaaagtactgatctaccactcagttatacattttaaactagggacttcctcccccttgtaagtgtggctaaatttttattagttgaattctaagttattaaacatattttaattatattcatccccaaactgcattgattcaaaaacacattttatgtaataatacattttacacaataaaatttaatttattaaagaaactcattttatgagtataattaactcaaaaagtttcttaaagcttttatctccaaaattaaaaaaaaatattgtatagacagaagtcttctgggcttggactcatgttatagtggttccctctcatccattaaaagacatttttttttaatttgagggttcctataaagggtacacttgcttcggtgacatgtatatttttctctttgtaggactattcttatttcctcagttatatacagagaataataattagataaagtatggtgataaaaactagatttcacacattagcatttctttcatgagacatgaatactgacatcagttctctgcgtacattaagaagctcctcttctagctatagccaagaaaaaaaaaatcacacttagatttcacattttcgctgtaaaaccaccaaataaaatagaaaaaaaaaaatcaagctgttattagtgattcattttaaaacaacttctttcatgaagatattgcattctaacaggtctacagatatccacagaattctgtgatcattactgatattcaagacaatcagttgagagaaggctctaatcttttaaagccccaaatcagtgaaatttagattcaatttttaaaggaagagagtaaaattaaaagtctagaaaacaatttcaacaaggatcaacctagttaagtagcttgtttgcttgaagctaaactagcttagccacaacatcttgatcctgtactatgtcagcatattgaggttctatctttgtaagtacattaatatactgtgtatacaaagatcagtgtacttaaaaatgcctttcatctttgagaaaactccaaagacattatcacttaaaacagtacctttagtcccttcccaggtccatccacatttccccccagaatgcagctgctggtctactaggccactggaaagtaaactaatttaatcctcaaatctaagtaaatgacatcttgtccaaacagacagtaattcttccactaaactacagactttctgggagttttgtcctgccatattttctccttcagaagacacagcaggacagacgcctgctgcagtacccagtgtttagaaactgcaaacaaatcattctttcagataatttttcaatttgcaaatttatattctcttttactccttaggagggcctgtttaaattacccctattctttcactataaatatgctcccattatttaaagaactaaaagtaattgggctaaaactattttctctcaacccaaaagaaaaagaaagacataaaagcacacacacaaaaaaatcaaaaacaaaagacattaaagtatgattatcccattttcaaacttagttgacttaccatgtccttaagaagcctgtcttgcagcactttcatatcttctttcatcaaacacatctgtaaaaaagtaaatatatttcacccatgaaatttaccataaagttttcacagcaaagacaaagttacattaacaaattctttttgtaatcaagagaggtaacctataaaaagcataaaatttatacctcggatgtaaaaacagtttcttcactatcagtattacagaagacacttttagccaatgaagttttcaaaagatgaagcctaagaagtaaaataatgagttaaccttgtatttatcaataattcaaattagagtgctataatatagtatatataattttaatttttcaaatagaaatttattaatttaaaaatctaattttatagattatagccattaagaatgtcatactaacctctgttgttcgcttttttgatatgcactgaacttctgaaatatcttttcccaaaagtcctaaattaattaataaaattttatttagtcctaaatattttagtcctaaaataaaatccagttaaactttaatatgattaaaaattaaaatccaacagtagaattactctatttctattattacaaatttaaataaacagtatggctatatgttaaaaatattccagatgtcatatgctctttcaaattaaaataaaattgaaagtaaaatctctcaggatttctcattatcaaagatattcatcataaatttaagttcgtacttcaaaagtgtttctatgaagctgattagaaatctaagataaaactaaattattttctgaacaaaaagctttaggatgtgctcccaaaaaagaaagtttttccaagtatagctctttaaaaataaggttttaaacttatttaaaaaatttttaaagtaacaaaccacaaattccttttccaaatcttttaaagactgtgaatctttttcaaaattctccagctcctctatgataatgaattggaatttatcaagttttttaatcctattacagaaacaaaatgagattaattttaaaaactgtagcattcagaatataggaatatgtagcattcaaaagttttcagaacagatttttattacagacctagagtcctgactttgatgattcattgttctcagatgttgctgagctgttttccaagactgcgtagtaaaataactcaacattttatgtcggatctgaaaaatactcatttttaagttaaaatatctttacaaaataacactctaaccaagactacagtaacagcaaataattttccacgaaatgtaaattactaagaagaacttggaaaagtgaaaaattaaaaactcagttatttaaactgaagtgttaatagacactgctctgagtgaacttatttaactccatcagtaggtctttgactaagggttgagtccacaattgttttcataagaaccccacactctacagtatttacaaaaatgctgatggttataattctcttcaaagacacagcctaaaagtcacactcagaattttttaaaaccatttttttcacaaaaacataaatctagctacagacacataggagaatatataagtcaaagcttctctattcagattaggttggccttgggccaaaaaaaaaaaaaaaaaaaaagaaacagaaaaaacaagcaatttctaattttaaccctgaatataggagaaaggaaagcaagactgggggcggggggggggggggagggtgttgataacctgtgcccaaaatatcttttattcaaaggagggcataaaaaactaaaaaactatcgattccaaatagaggcatgtgaaagagataggcagaaatatattactaataattaaaaactgttttaaaaagcatttttgcattatctcactggaacctcaaaaactaagactacataactataatacaaaactagtaaaacaaaatgaaatggtattgctctgactgcagctgctcattctttatactacactatactatcttcattaatgctcacctaaatgacataaaaaatgtcttgaaaagtggcatgaaaactgtccagtaaaaaaaaaaaaaaaatcacagaaaagccaaaacattaaactgaaaaggaaaataggacaaaagagaaaaaagtagtagcaaaagaaagaatacgggtaatatacagattttattccaattattcacatataaggaaagttggtttcatgaatggatattttgttgccaaaggatcaaacaagccaatggtctagtagaaagtgtggcatattattatattattgggtataaatcataatttaaagaataactcacattattccttctcttaaattctgaattgagcctctcgtaagtctcataagtcatctctatccctgcaaattcattttgccaggtctcccaaggaatagaaaagtcatttgttgataatgaagatacactttcagacactaaaaaatgaaaacaatctgctgaagttaaaatatgcattactctaaatttagccttgtaattaggctaagaacaaaatctatcttattttccgaatctatgtgtaacctaaggattatgaaatcaaaggcagaagagttccttatgttttttttaatttaaaaatcagattattctgatttataaaacaaactttttggtatggctattacagcagaaatgactactttaagctggaacatttatggattatttttaactgctttttaactagttccacattattattaggtatttagtgaggtactagcacatcagtaaattcatactctagttaacctaaatgtgatagtaagtgacagaatgatgagggagatctatgggcatctaagacccttactacaacaattattcatataaatgtgaactttgcaataaagcatcatccatcttggacatatccaaagttgtctttacaaatttgttttgtaaatagactcattcaaaatataagaaccaccctccaaataactgcattttgatacaggctactgatctacctacttttgtggatatgatgatctgcatcttcaattttacacagttttttgggaagcaagtttgctctcctttctcctttctcttccatttctacttcattggaattacttagattatcttctatatatattcttttgcgactaagatgttgggtggggccttaggaacagttaaagaaagttaaaagcgctgcaattttcattaaaaatacctcatattttcttgcttttattttaaaaaggctttgtttccactaagtatttttattatgttttaggtaattatgcattcaattctacctagtttattttctttttacattaagttgaataacggtatgacttaaaatacataattcctttagttgaaatgtcacgtagcatttcagtaatcattttttaaaaagcaagactatgactacaaacctgatacatgagtagcatcacagggcatgtcaaaccacgttttctctcttccttcactagacttggataatgaagatgctaaatgactttcctaaaatacgtattagaaattagaaaaaaattccgtaaatatatttcaattcacattttatcacctttctcaaacccaaaaaccaataattttaaatgctgtcaattctttctcagattgtttctatcccttccttttcatctctaatatttaccatgtgttaaccttgattctaagttgacctcaatcttcttgtaatagctgtgatgtgagctacttttttttctattcctgcttttcatttctttattaggatttccatttctttgagtcaggaaatgaggagccacagaaaactaaagtttaaactactcgtctttcaaaccacatctttcacatctaaccttatgttatactatttgaatatacaggttttacttagtaacctttacataggttactgatttttctccacttaatctacatatacctacccatccacttaggtctagctcaaatcgcagccctctccaagttgtaaaattctgtcttgattttctatattttacaggttactaaaatatttttattgatggatggatgggcttttatgctggcaggaagttcaaccaaatacctatatattcacgaaaccagaaagtgcctattgtaaatatgcaatccggggttcagcagtggtatcctcactatttaagaccttactactctcattttaaaagtttcaactttcttctatcaaaaaatatttttctatgatcaagccattctatatactttaaacatcagattttcaggtaataacagttgaaaagcattaaaatattataattaccactaaaggtcagtaatctgagtcttataagaaccatcttagtgtaaggaaaatttataagttatagtcccacacttacctctcttttgctttgtatataattttcattgatatgtggagattcaatttccataaaccgttcttctgaactataactgcttacatctgaatagctgttactgttttgtgtttcttgtgtaagtaccagagaacttattttttttctatttacaatagtattactcttagttggagtatgtctgggctatgaatgaagacatacaaaaacccaataagaagttacaaaattgttcaaagccccccacttcaaaaagagttgaacataagaaacattaaagcaaaactgcaaaactactaattcactgcaaaaattcaattccaattcataactaaaaataaaaaatccttaggcaagtggattattactttgatgaccaaaacctgtagataaggatccctgctagtacagtttctatgctccagaggtcaaagtcaccttaacaagaacacgaataagaattttttgcattttctgttctaatcttcatgtgtaacagtttatatggctgtctatacagaaaagccaagagaatctaggcagacaatcatgataaaattcagcaaggttgttggagataaaacaatcaatagtttttctatataaaaattttaaaactcagaaaatgtaatttttaaaaaaagtcttttttttaatacagcaaaaagaagacccataaaatacttaagaattaatctaacaagatgcataatttcctttgtaggagacttcacccaactttgcaggaaataagacaaaaaagtggagagagaaatcatgtgtagataagaaagatcaacatcaatattgaaaaatggcaattcttcccttagacaaactaattctaaaatgtatatgaatcagtaaagggcaaaggaattctgaggaatggtggggcagggggtatgtaacaccctataaatgtaaaatgaccccaattaaagcaatgctggtattagcacagagatagataaacaggccagtaaacagtaaaatctaatggtgcctaatccaggcccatgtgatcacccagcctatgactaaattaagactattccactcctgatgtcgcactaatttgatatccatatgaaaaagaaagcctggagagactcaaatctaaaatttgagtcaaatttagactcaaatctaaaataagaaaatatttttatgacaatagcttaggggaagatttcttaaacaacccagaagattggtaaatttgattatgtcctatcttttgtcatagggaagttgtgtaattaactgaaaatatacatactaggaaaagaatgtttacattatatacaacgaataaagaatatccagaatatattaagaactcatacaaatttgtaagaaaaatcaagcaatgcaatttaaaaataagaaaacaaacaggaaattcacaaaatggccaaaatcatgtgaaaatactcattgatgcaatgagtcaggaaaatgcaaattaaagacacaactttatgcttaccagactggcaaaaacagaaacaactgataacatctacttagttaaaactgtagagaaatgagcactatctcatagcagtgttgagagtgtaagtaggttcaactaccatataaagcaaatttccaacaccttattaagagttgacagtaaaggggcagcatgggggaatgtctcatgagtgtccagccaatgaatatgtaactgttaaaattccatctaacacagagtagcatcaaagatggtgggtggggattacctaggcttggagattttgcaaggtggcatactgaagggattaaaggatgcgggggaaaataagaatgacagaaacaaagggattggttctaggacctcttgtggatatcaaaatcagaagatgctcaaatctgtgatataaaatggttcagtatttgcatataacctatacacatcctcccatatacataagtaatctctagattacttatgatacctaatacaatgtaaatactcttaaatagttgttatatgtgttgtttaggaaatggtgacaagaaaaaaaagtctgtacatgttcaatacagacacaattaaaaatatatattgttgtctgtggttgaatccacagatgtggaacccacagatatggagggccaactatattgataaaggatcacaggagaatttgtgtgaatttcactagtgtgaaactgggtttcaaattgtggtctgtagaaactcagagttttgaaaatatgccttggggattatttgggagaaggaggtgaaggaggctaggtagatctagggtttagatctcctacctctactttaaacagcatagttctacttttatctttctgacacacaatggtccctcttagctgcagttttgctttccagggtttcaataactcatgctcaaccatggcccaaaaatattaaatggaacattccagaaatcatttataagtttcaaattgtgcacaattctgtgtggtgccatgaaatctctggccatcgggttgtcctgcctgggatatgaatcatcactttgtccagcatatccatgctgtatatgctacctgcctgttagtcaagtaatagccatctcagttatcagattgactgtggagatatcgtagtgctcaagcaacccttattttactaaataatgcccctcaaaagcaagagtagtgatgctgtagtgtattgttatagttgttgttttgtcattgtaataatttataaattgcatatttataagttaatgtttaaattaaacaatcataggtatgtatgtataggaaaaaaagatagtatatatagcattcagtgctatcctccatttcaggcatctattgggggggtcttggaacgtattccctgagaataaggggtgattactgtacagagtacaggtaagagttttgtaacaggaatgatcacttcctaagagatactactaattgttctacacattagaactacacacattttctagatctgaataggcttattcctgcaatgcaggtacttctttcagatttcaccataatttaaagtctatggcctttaataaactttagttacaaaaattacaagttgacaaagtaaattgataatttagttgaaaacagtgtaattacaatatttggtttaggtgtttataaggaagtttaacaggtaaatggtaggaatataaaaagtaaatatatattgaaaagaaattcttcattcttcctcatctatgtatcacattatatgtatcatttcttcttaaaatatagtagaccctcctgaaatcacagatagtacctcaccctattatactatgcacagatttctttttcctaatttcatggaaagatgattcattcttaccatagatcttagcaacttccacataccttatttttggttccttattaagcacagaatattcaccatttcacttaaaggaaaactttatggcttctctttggcctatctgaattgtcagcatcaatactcttgccctttggcggtattgttaagtaaaataagggttactttaacacaagcactgcaatacctctacagttgatctgataaccaagatggctactatgtgactaacaggcaggtagggtatacagcagcatggatactctggacaaagggttgattcacgtcccaggagggacagagtggatggctcaatatttcatcacactattcagaattacacacaatgtaaaacatatgaattgtttatttctgcaatttcttatttaatattatcagaccacagttgactgtaggtaactgaaacctcaaaaagtgaaaccacaaataatgagaaactactgtactctcctgctaccacattcttcctcctgtatagctatacatttatttgtctgttaggttcatcaagactggcaagtatctctctcttgtcattatgtccctctcccccaagaccctagaccaaacccaaaaccttaaatagacaagcaatgtgtatctgattaagatgatagggaaaataacttactaccttcagatatatctgataaagagaaaaatatatatacattctcaccaaaaacagtggtcgtggaattggtgaacaactttcacttgcacacaggaagtttttctcattgtttttgggtgactttattgtacctccaactccactgttactatttaaggattcaagtgatgaagtttttggataaggtgatatagattttgttatgcagtcataatcctgagtaaaatccttttctgttattttctctatacctatattgcatcaaaataaaaaagaaaatagatggcaagcgttatcattgatgtctgctttagaaatagcacgattaatttaaattctaagaatttgtcagatcttcaaatcttagctataaaaaaggatagctttaaaaatattaagaccaagttatatttaaaatatttgtaagactgaaaaacaaaatggctgaatttaaaatgtacttgtaaccacaagaactttcaaaacattttccaacaaaaatatctacagtatgacctgaaatataaggatcaacctaagtattatcttgagtattctgacatcatagctgattgtgttatatatacacatcacaaaattttatgattgaaaaaggcttgagaaatcatctgctctacatctttcacataaaaattagaaaatttactgctggaataaatcttaatataaataaatcctcagacaattttcagatcgaatcagggcatgtacatctatctcctgagtatgcgcttatgtgaaatttcatagtggtccttagtactgagaacacaatagctactttagaggaagcagaagtatactaactgatttaagtcttgtattttaactgaaatgattagcatttagaaatgctttaaaatgtccttacaaggaaacaaaaatggtataaaaagggcaaacttatactttctatactagaaaggcatacacatataccagagctccaaagaatatgaatttttctttagcaatcatttaaaaataaaagcataacctcaactgtatacggtattaatccactgtgggtccacagaatgagcaagatattctttggacttttgttaatgaaatgtaaatagaaaaaacagaattctccaaaaattctcatgttattaaatatatattgagctaaaaaaaagcacattaaaattaagtacttttttaagattaagttataatttgtgaatatatattattttccatattaaagcatttgatctttaacttcctaacatgaaaaacatcagtatcctagtagcattgttcccatgttatcaaaagtcaagttactagcattaattagcttaacaatgaagttttaactactataattataaatacccctcaaaattagtcttaaaattgtattttcccataattagagttatagaaaactattgaatattcaagtaaagaaaaaacaaagttatactgacatctcgttacttctatagatgatggactgccagataaagatctgggagataagtcaaggcaattatctcgtatagcatcttttagtagagatgagtttttccattgttttgatagttccttttctgtttcagcacagaagactttctgttgtttctttggtagctttaccgttttcattctggaatggatattctcctcctaaatgtatcaataactttcaaattatactcaagtacaaatatttacacttggacacataaaacaaattatattcaaatatttattaaatgttgtatattaccacatacaggcataacaaggacctagacatgagtagtgaaagactttctaatatactagaagccataagacaaattcacaggagaatataatacatttactataataaatatcttaagagatacaaatagccttctttgagggttcaaagattatatccagtttaggaaaattagaaagcattcctaaatttcatagtatttgagatactaaggagtttgtgaaagaaggtagaaaggggaagacatactgcgaatagagaagacttcgcaagaacagagggagttgagaggcacaggtcttttttgggagtcacaggttatactatctgaccatttcacagttctgggcatacactggagaagggtagaaaaaagcttggaatggcattttgatgctctgaatatctgacaatagagatatttttagggtcttcctttgaagagggataagatgagaggtggcttgagaaggcatgtgactatttgtatggtaaacttcctttaagaagtgacagaaggctgggcacggtggctcatgcctgtaatcccagcactttgggaggccgaggcgggcagatcatgaggtcaagagatcgagaccatcctgaccaacatggtgaaacccagtctctactaaaaatacaaaaattagctgggcgtggtggcgtgcgcctgtagtcccagctactaggcaggctgaggcaggacaatcgtttgaacactggaggcggaggttgcagtgaaccaagatgacaccactgcactccagcctggtgacaaagcgaggctgtgtctcaaaaaaaaaaaaaaaaaaaaaaaaaaaaaaaaaaaaaaaaaagaagaagtgatagaaaatgtagacctaagttaggaagtctttaaagcattttgggtaagagataagattgcaaacaagaagagatggaagtttatgatgtcaaatcagcacactgtactgttcagaaacctatcttcagtgccagactctctggtttcaaatcctagacctaccacttcctagttgtgtgaccttgagcaaattccttctctctgagcctcaattttctcagttgtaaaatgggatgacactaatagtactaattacctatagtacttatgagatttttagacattaaatctgtaaagtgcttaatatagcagttgacacattgtaagcactacatatatttatatactatacacatacactatactaaaatagtaatataagtatatatatttttcccataattggagttatagaaaactattgaatattcaagtaaacaaaaaatgaaattatactgacatctcattacttctatagatggtagactgccagacaaataaataaatatttaactttgctttcaaaaacaggtgactgggaatgtttctggacattatgagacataaggaagaagtcagggatggtgacaggtgggccagtgtgtgggaagaacctcagacaccaatattttgctttcactcaacagacacacagcttctccatgctatactttattaaagcctaattttagaagattaagtacttctccctttcaaagatactatcatcaagttataatttcactagattcagacatctgttttgtaaaaaaaatgccaacttattacaaaatttagcattatattgcctaagggcaaatttctagaattattatttaagttttgtcataaaagaagttaactcttaagaagtaacaggataaatttgacattttttacaaaaatatatatttagtattttaagaggcttttagaaattaatctgaactgtatctatttacctttactggtatgttctctttaaatgaatgtgaaaattcttgttcacactctgattctgaatttgagagatctttatagtttttttttgttttggttgcttttcgtggaagtctgattcttccttccggaattgtcttgtccatcttttttgtgatatttttactgggtgtctttaggagaaaaattcctgaatattagatcaatatttgaggtacaagaaatacaagcaatttgctataaaattggcactgtgacaagttttacataaaatatttgtaagaatgattcttgattaacatactttaaattaatggattttatcttcccattccagttatcatctttaccatctctgtatccctaccattaagtccctgagaagcctgatatatactatctaactgaagtaaaagattttaaaaatacctaaaagcacagaataaaatggagtcaaaggccagtatgatttaaaaagaaacaggagaaagtgtgcaaaagaaggaagaggtacataaaacacataactgataacaaggataaaattatgagatgatgaattatttttatatggcaagaaaaaataattttaaagggatgtttgaacacaaacttcttggcttaccattttagagcttggctgtcccttttccaaggatgatcctgtaattcagaaaaataaggttaaattttcacagtaaataagaataggcattaaatttattagaacatcatttcagcatatttaaattaaaataataaaaagtagtaagtttttaaagcatgtgttagcatttaataagtgaacctccatgtggcctcaggccaccaggataccagccctcctgacaccgtaatcttctcacctcttctgctgaagaatctggcctcacaatacactattttggaagcttttcctttcccagaactttttagtagcccaattgtaccacatctctgattggcaccatttttaaactcattcaaaaatgtaattttcaagaattgataacttttactgtaaagtgtttcttatgatatgaattgccagttttcctccctctcctttattttatagaactttttaaacatataagagaatatgtcagcataagttaaaaagttaacacctataaatctaccactcaatttaagaaccagattgtgtataatgctgaatctacttacgtatgctctcttataccatcctccgtgtcccttctgctaaaaggtaattactgtcctgaaatctgcaggtcttagttacttgctttaaaaacaagttttattacatagatataaatctctaaacaatataatgagatttataaaatatcatgtcctgtataatatcctacgatttattttccatacatcacaatgttaataagatttacccatattattgatagcagatttagtctcacttctttttgcctttcaagcataatgttatctttccaaatagtctctgaaacctaagaaataagattatccaagcaaaggaagcaaagctgttttggaagagaggtcctctaatcttggcaataagtcaactcaaacacattaacttgtagttattcaataatttaaacaaaagaattcatacagaatttcaatttcgtaagttaaattttataaatatttagtgatgacactaacctctaacatcttcgtgagatctctaatcttctactttatgttataaatgtttttatttgtacatcttcccactagactgtaagctccctgagggcatgtgaatcttactatatttatctttggctgcttcaaggttcagactatgatgcaatctagcctcacctttcaccattttcccataaatatgatctatgtaccaaatacttcaatactgcattccctgaatatactatgctattccatacttctctcccttttatatatgataatcctgctgctttacttcctcatgtatctggtgacctctcacctaaatttcaagattcagcttcatttctaaacacatgccaaaattcacttctatttttaggtaactactggttatttttaatcctgaaataaaatgaaagctgatgcccttaaaataaatatacatttagttgaaaagcacagagttaagtcttcttttaaaaatgcaacatataaaatctttgttttagcaaacattgaaattgatgttcagctatgaaaatggtaattctctctagccaaaacttatacctgaaactcttaccaactgcttcaggagattcactatcacagagaaagcagaagccactttctaggaaaatactttgtggaaaacttagacccaaaaaaaaaaatctggaagaaaattgttttccttttgatatattttttgtgtctatataaattcctaaaaaaggatgcgtgttgggtgcagcaagaagatgggatatttagtaaatataaataaatatatatatatatatatatatatatatatatatatatatacacacacacacacacaaacatataaatatatttattttatacacacacacacaaatgtaaatacatgtaaatatatatagattagtgtcaaagttcaagccttggtcttaaaggtgttgggttcatgagtacttggtatattattcacaataattagctaaataactggataatactgggccatgagtagacaagtgacgaaaatcatgagccaaggataatgataagtcataatttgtgtccctaaggtcctattaaaaataaatataaccgtattactaaaataaaacaaaaaacataaaaactagtgttttgtcctatccatgaaagtatgtagtaatgaacagtctaaatacaataagcttatataaagcattttcaataattgaaataaactgcaaaatcatttgcaacatttatccaaaagataatttcttacttgattttccacttttatgattcttcacatttttatttctgctatagtctattagctgtggttttgatttcggttctcttagccagctaatatcagtcttgctgtcatcacatctgtactctgtttcagtatcactaaacagatttttcttttgatgatttgttataatctataaaaaaaagtttgaaatgcatgaagaaatactacatctcattatgtcatgcaaggtaagttaaaccaaaacaacaacaacaacaaaaaaaaacaaaacccaaaacaggaaaactaacttgtcatttcttaacatcctaatttaggatggcattaataacctatccaagaaagtcacttggaaaaccagatcagataatgatatttgtattttggtgttgatgttgttaattcaaagttaaatcaaaacaacttatttccagagaggtataacctaatagtatacatattaaaaaaactaaacgtggcatttcttttattagatgattacaaatagctgaaagaccataagaaaattcataataggaaggtggatagttgcataaataaaacaatcaaaatgtttttgttttcttgtttttgataatctttaacattaaaaattaagagaaatactacttctaatagacatattgagatattataacttacttttttatcttttgttttgacagaagatttaagttcatcatgattccttggacctacccttaaacaaaaatatgtattaattaaaaaatacccttcatacttgttttcttaaggtaatacacaatggacaattagacctgagttttcagtcttaactttttcactaattagctatattattctggccaagccacttatcctctctgacctcagttataaaataactatattggattaaagaactactaagtctttttagctttatgatctaggatatacaactaatattcaaagtgataatttgcatattaatttaaagagtaaatgttgaagtaacagaatcataatgagagtaataatgactagcatttttattcactcttctcatttgttaaaaaactctaagactgggaggagatatttaagagaaaaaaaaagatcagaatattttaatctaataaaaatacctacaatctaattgacctatccgcacaagcttctttagctgtagcttgaaactcttggatctatattgtaaataaacaaaaaaaaagaggtgtcagtgtcaaaataaaaaagattaaaaggaataaacataaaatctagttttgcttcacaaaatcataagatttgacataaaattaactttactacaatatttgtatttgaaaagaaaatacaatacactaaaaatagaatagttttttttttcatcaataagaaaggtgattttcttggtagtgaaggctttctaccccacaattgcttgtttttctctaccttattcctaaacaaaaatttaaaaaaaaaaaaagccacctaaatatacgtaggctggttatccaaaatattattatatatttcttaaaaattttaaagcatatgaggatgcacattaaaaacattctatgtaataactgcatggtaaatgcaatgtaacttctgagtaaatacaaagtatcttggtattttagcttactccaagttttatgatagggtcatcagctccattcaaattaaaattgtaaacatcattcctgtgaaaatgaagagcaatattagctccacttaaatatgtgtagtctcttcaaatatgaagaaaatgaaaaatattacaaaaaatacttacactgggcattcagaagtaacattaacaaaggtagtcttcagttttctgtagctttttttctgaactttttcctgaaaagagggttataaaaaaatcattaaatggctaacaggtatatgaaaaaatgctcaacagcactaatcagaaatgcaaatcaaaaaatgagatgtcatctcacctcagttaaaatggcttgtaccaaaaagacaggcaataacagatgctagtgaggatgtgggcctcatacactgttggtggaacgcaaatggtggtacaaccactgtgaataacagtgtgaagtttcctcaaaaaactaaaaatagaactacagtatgatccagcaagttactgagtatatatccaaaagaaaggaaatcaatataccaaagaggtatctgcacacccatggttactgcagcattattgaaacctaagtgtccaccagtggataaatgcataaagaaaatgtagtatgtgtatatacaacgaaatattattcagcaataaaaaaagaatgaaatcctgtcacttgtagcaacatggatgtaactggaggccaaagtaaagtgaaataagccaaacacagaaagacaaataccgcatgttttcactcataagtgggagctaaaaaagtgaatcttatggagatagagcgtagaacggtgattatcagaggccaggaagagtaggaaggagtagggggggaactaagggattaaaaaatatatatattaccagtgaaatgtacacttaaaaatgataaagatggtaaattttatatgtatattttacctcaacaaaaaaacttgtacattactctgtgtggcaaacaaataatgtgcatttttaaatatttttctagatgtgcttccactaacataaatcttacatttgtaacattctccttaaactgaataaaaatatatgcaaaataaattaaatcaccacccatatatataattgcattcctagggctgggcacagtggcttacacctgtaaccccagcactttgggaggccaaggtgggtgggtcacctgaggtcaggagttcaagaccagcctgaccaatatggtgaaaccctgtctctactgaaaatacaaaaattagctgagcatggtggcatgcacctgtagtcccagctactcaggaggctgagacaggagaattgcttgaaccagggaggcggaggttgcagtgagccaagatcacgccactgcactccagcctgggggacagagcaagactctgtctccaaacaaacaaacaaacaaacaaacaaaggtatctacattcctatgttcattgcagtagtatttataataatcaaaacatggaaacaaagtaagtattcactgacatatgaatggataaagaaattgtggtgcgtgtatatatatgaagaaatactattcagccttaaaaatagtatatcctgaaatttgctataacatggatgaaccaagacaagaggacattatgctaagtgaaagaaccagacagaaagaaaaatactgcatgatctcccttatatgtggaatcttaaaaaaaaaaaaatgtcaaatctatagacataagataataaaacagtggtcaccagaggatggcaggagggaaggaaaaagggagatcaaaggatacaaagttgcagatatgtaggatgaataagtctagagatataatgcagaacatgaggactattaatagtattgtatagtacaccaactatatataatacagtattgtattatataatagtttgttgcaccaacctattatatttgggatatttgctaagagtagattttatgcgttcttgccacacacacacaaagctgaatacattaatttgattatagtaaccatttcactatgtatatcatgttatacaccttaaatacatacaataaaaaaacacttctttaaatatcgaagacttaaatagtaaaaatacaatagaaaatattgtaaatctaataaaatcctttaaccttaatacttactgacattgttgtacgtaaataaatgacctccttactggaattctataagctaaattttggtgatgccatcaccacaaaccaagcatgcttttcctttgttttggactctcatttgctttaaactcttaaatagaaaactttgagagaggctaaggtttatgtaaaatctcatgtaaaagagtcaaaaagctatcaattaactagtattgttaggaaaaaaatatgtgttaaattatttatacagcccacaactaaaaatatattcaaccagatctcaaagtagtgagggcaaaaaaagaagttaaataacatttaataaattaattgtaatatactgtattaaagaaatgtactatgattaaatatcactaaataattgattactgatcagaaataattagtaagttagaaatattaaaacctaaaatattaattttatgttgtgattcatcttcaatttctttccgttattttatatagacgtatttgcattattttaaaaaggttatctctcaatatattactcctctgatcatttatctgacttatccttcccagtatgatttttaccagtgcttgcatacatatgttcattcacctgttgcatcgtttgtgtgctgttacagaatatgtaaaaatgagcaaagatgttaaagaaggtaagcaaaaggcagcaatggtattatagagaatacaaagatgagcacaaaaatattacagaaaatacaaagatgattcaaaatatagtgaaaaaacagaagaaaaaacccatgagtaaaatagcaaaaataaataaaaatttaaaaggtaccaaaacactctattgtacagattcagaattcttgccaaatgggtttttgagtcagggcatcttggaaagttttcataaggaaggtacaaagagaaatattttaataatcagataagagggtgagagagcctactgactcagtttaaagttcattgcaaagggagaagaaaaagagaatacttaggaaagacttacttcaggaaacctcaagttatgtttcagttaaacatgacatgcctagaaaattaagaaacaagacaatcttttaaagggaaaagtgagccagtctatgtttccatttaattcaataagcaacagggaccaaaaaaaggtttctgaacaagtaagtggcatgattggagctgtgtgccttagaaagaaaaaaagctggtagtgaatgtgatgtaaggattgccacagagaaatgctagaggcaaagaaaattgttaacacataaaacctattgtaacaatccagagattagaaatcagaaccgaaactgggctaataggagttggcctcgacaggggagaaaacattcaagaagaacttacagagggtgaacttcaaaacttgaaatattaagtggacacagagagcaactgtgaggaattagaaaaaagataatttatattataagcctggataaagagtaaaggttttttttaaacaaaattggaacttcagtaggatctaattgttaggagaaatgggattggctattaaaaaaatacacacacacacacacgcgcgcacgcgcgataaggatatactgaatcatataccaaaaagtaaaaatattatgctcatatgtgtaaaagaagctttttatttgaaaaacagaaggttggagggctattttgagtacttgctattaaacctgtcagtggttatcattcatttagcaatattctgaaaacatcgtatcaaattccattttaccactatgctattttagtgtttatggtcaaatattgagtttgactatagatttggtgaagttaagtaaataacacctaccttactgagttgtacaacaggtttgtttgaaaaaccactgtaaaaaaagattttgtcaaaattgaaaaagcaaatcagtatcaatatcataaaagtcattttaagataaaccatgtttgtcactaaatttatattcaatgttaaaaataaccaaaatgtaacagtaatagtctgatagttttgctacttcactcacagtaaacagcacttataatagagcattcgaagctgaatcattaatgcagcagaaagtgtgaatttaaaatgaatgattccaccataagaatcatttattcatgacctatagtaaggccagaattaacgtaaacttgaattaaccacctaatagactataaatagacattttgtaataaacaatctttggaaagactgcaaagaatgtactatttactacaaaaaaactcatatctggttaaattctgtatttcattaagcaatgtatttaaatatatttattcattattagattcagtaagtacaatgtctacatcctaaagatttttaaaatggtatgttgtattgatgtgttttttgatcctatataaaatgtaactagacaatagaatgacaaatttcaaatttagttcccttcttgtgtaatttaaacacctactatttataaaagtattaagtaaccatgtgttttctactgaaaagttacattatctgaacctatgtttaaaattaacctttttaaaattgtgtaatatagttgtatctgtcagaaaaatattcatgtctgaaatttaagaacatacctgttaatcaaagactcctttaattttcttgtagacttgatgtcatcttttgttttgtatcttttattgatttggcttatcaaggattctgctacattggtaaattctttcccttttgacttttctctctgaaaaaaattgtaagttacttttaaactctaccagttaatctttaaaggaaaaataaaggctgaaaaaaacttttaagataaatctggttctatttatacctgcggagagaaataaagagagtcaactgtttagtaagtttgagctttgttaggcattaaaataagataattttttttattatactttaagttctagggtacatgtgtacaacatgcagatttgttacacatgtatacatgtgccatgccagtgtgctgcacccattaactcgtcatttacattaggtatatctcctaatgctatccctccccccttcccctaccccacgacaggccccagtgtgtgatgttccccttcctgtgtccaagtgttctcatcgttcaattcccacctacaagtgagaacatgcggtgtttttttgtccttgcaatagtttgctgagaatgatggtttccagcttcatccatgtccctacaaaggacatgaactcatccttttttatgactgcatagtattccatggtgtatttgtgccacattttcttaatccagtctatcattgagggacatttgggtgggttccaagtctttgctatcgtgaatagtgccacaatgaacatacgtgtgcatgtgtctttatagcagcattatttataatcctttgggtatatacccagtaatgggatggctgggtcaaatggtatttctagttctagatccttgaggaattgccacactgtcttccacaatggttgaacgagtttacagtcccaccaacagtgtaaaagtgttcctatttctccacatcctctccagcacctgttaacagaactgtacagagtgctttgcagacattttaaaaaatgtttctgcccataagaataaaaaactgaaaaaaggagaaaccatttctttgaaaagatcaataaaattgataaacctttagtcaggttaactaagaagaaagagaaaaaaaaaacagaaattactatcagaaatgaaagaagggccatcactgctgatcacatagacataaaaataagtcaatattatgaattccatgcccgcaaatgtgataggctagatgaaatggaccaattccttgaaagacacaatctaccaaaacctatgtaaacagaaacagatcatctgactaggcctatatctattaaagaaatggaatgaatacttgatatcctaccaaaacaccagaaagagttcacttgtgaactctatcaaacatttaaggaagaaattatgccaattctccacaatcttctacaagatagaagagtaggaactacttcctaacttagtctatgaggccaatgtccccttaataccaaaaccaaagacactacaaacaagtacaaaccagtatctcccataaacacatacacaaaaatccgcaacatcagcaatatcagcaaatcaaatcctacaatgtataaaaagaattatgcaactattaccaagtggattttattctaggtatgcaagaatgattcaacatttgaaaattaatgtactccatcataacaggctaatttaaaataatcaatcaatcaatataaattgatacacaaaaaacatctaacaaaatccaacacagattcacgataaaaaacccttagcaaactaggaataaatggaaactttctcagcttgataaagagcatctacaaaaacagttacagctaacatcacacttaatggtgagaaacgagatgcttttcctactaaaatcagaaacaaagcaaaaatgtcccctctcattgcttctttttaacattgttctggaattcttagctaatgcaataagacagaaaaaggaaataacaggtatattgattgggaaagaagaaataaaactctttgttcacaaatgacctgtctgtagaaaatctcaaagaattagcaacaaaactactggaagtaataagcaattgtagcaagattgcaaattacaaggttaatatacaaaagtcaaccactttcttataaaccaacaatgaacaagtgtaatcaaaaacacaatataatttacattagcactgccgaaagaaatacttagatgtatatctaacaaaacatgtacgagagaaaaactacaaaagtctgatgaaagaaatcaaaggagatctaaataaatgaagagatattccacatatatggatagaaagctcaatattgtcaagatgtcagttcttcctaacgatctataaatttaatacattcctagttgaaagaacaaacaagtggagcacaggggaatggtatggcactgaagctattctgtgcaatactgtaatggtagatatgtcacttcactacatatttgtcaaaacacacagaatgtacaacaaagcatgaagcctaatgtaaactaagcacttgagttaataatcattatgtatcaataatgactcatcaattctaccaaatgtaccacagtgatgcaagatgttaataataggggaatgggtaaatgggtatacgaggagtctgtatactttctactcatttttgggactaaaattgctccaaaaatgattttttttaaaagtaaaaggactacaaaataagaattattctcagcataatttagataacttagttttaataaagtccaatagtattcttaaagatatgaggtctcctgattttatatttacttttctctggttatcaggcatatataggttttttagttgtagtaatatacacaaaaatctagtaaacacaaaatttactattttaaccatttttaagtccatatgttcttatatataataggtactaagttattaatgtccccttaagattatcggagtggtttacttgtcttgatagaaatgtaccaaaaatgaaccttctccaaaatactgtatgatttcagaaattccagtataattggagccagcctgggaaatctgtgccactgaactaccaaggttgctctggggtgatccaataagtagaaagacagtatcagacagatggctaccttagaagacagttatcatctagcaccagttagaatgatgatcattaaaaagtaaggaaacaacaaatgctggagaggatgtggagaaataggaatgcttttacactgttgggagtgtaaatttgttcaaccgttgtggaagacagtgattcctcaaggatctagaaccagaaataccatttggcccagcaatcccattactgggtatatacccaaaggattataaatcattctactataaagacacatgcacatgtatgtttactgcggcactattcacaatagcaaagacttagaaccaacccaaatgcccatcaatgatagactggataaagaaaacgtggcattatacaccatggaatactatgcagccataaaaaaggatgagttcatgtcctttgctggcacatagatgaagctggaaaccatcattctcagcaaactaacacaagaacagaaaatcaaacaccacatgttctcactcataagtgggagttgaataataagaacacatggacacagggaggtgaacatcacacactggggcctgttggggggtggaggcctaggggagggatagcattaggagaaatacctaatgtagatgatgggttgatgggtgctgcaaaccaccatggcacatgtatacctatgtaacaaaactgcacgttctgcacatgtaccccagaacttaaagtataataaataaataaataggtagataggtaggtaggtaagtaggtaggtaggtaggtaggtaggtagagacagtgattcatgaactggtgggaaattctaaataggatacaggtagtgactctatgaaggactgaagacaatttctgaaaacaggaagttgatttttttaaaaatcagagcacagcttagaaaagattattaggttttgtgctcccagaaaaaaaaaatgactagctcagggaaattatgtgaaattattctaaataccaaagaaagcaatttaaaatttaaatttaaagacagatctttgttcggacaaaaagaaccttatttcccctgggactgagggaagtaaatagcagctaagatgagaaagagaaaataacatattaggacccaagaaaaaaagggacccaaaagaatatgattaaagaagaaaacagccaaattaggcacaaaaagtgagctgcaggtgtaaaaaatattttaaaggaggctggtcaagacaaattaaataatgcctaattatatacaattgcaaattatcttttaaatataatttgcacattgagaggttacattgtgtgaacattttacattgactctagaaatttggcttcccaggtatcagcattactacagaagataaatgaaaataaaagcctataaaacctggattatttcagaaatatcaaaaagcagattgcattacctgcagtggaaatgtattctaattaaaaaatttttcttaatctgcattttgatagttaagaaaaaatgatttacccgtaactgttacaaaaaagtaatattttcttccctggaagtctggtggcaaagtagctaaaaatgtcttagagatgttctccagagatgattaatctgaaaaagaaagtgggagctctaataatgatgagtaacagttacaatagaagacagtctcttctaacccattcacatactttcttgcaaaaccttgtcaaggttaaatgcattcatccaaaaaatgtttgagatgctactgtgtataaaggctgtgctaggacatgcaggaaaacaaatgttgaataaaacagtctatggttacagtcaaagagagaaaaaaaaaccatttattaaaaagaaaggtaggaattataagaaatgtacaaacagttctatatccaagtcaaaaggaaagagtgggaggaacctaaaaagaagagacaggaactgcatggttcattaattctacacatatttacatgtctgatatgcacctagtactgttctatcagagctacgacaagggagaggtgagtgaggaattctgagagtctgggcactgaattaaacaaggtattacacatgttaaatgtgtagcaattaatcaagtttctttctttcttatgttatcaagtaggcatcttatggatatgcagaaatcaaaacacattgaaagctcaccatttttttttgtttcgaatcccaggaattaagctcagaagtcaattctttctctgcttttctatgactttgcacatttttgctagcagatggatttttatcgcaagtagcagtattcacatcttttgacaatatgtatttcttcctatatatcagcgattcttcaattgtcttatttaggagaaccgatttaaaagtagtttcagattcaacaggccaatcactctgcttggcattttcagtatttttctgccctgaatatttaggatgattttgttgctgattgtgtttcttgcaaacttctacttctgctttatctattttgatatggtcggtttgttctttcttatatttcacttttcctgttccttcagaattatgatcagatattgaagaggatgatttttgtttagtaagttttttatttataacaatatctattggggaaaatgagaaattaattctttttaaattaataagttgacatatgtaaaatttgttaaatttgttttaatacttgttagacatttgaggaaattaacactgaactattacatatagataaaactaagtttcaccttgattcaatgtgtctcctgacgaagtacttgctctttggttattacatagttcaatgtttgttacaggtgtccaacatgcccatttgctgtgtattttatttccacagatgttgtctaaaacaccaggtaatctagaaaataaattaatttgcttaatgttacaaaacattagcctgtgactttaagaccttgatttttaatgtagtcaacgtttactgaaagcgattacttatgtgaaaattatgtggaaatttatcttatcttacagttctactgtatatttatatttctacacattaattaatttctacatattgttatatttctacacattcattgtttatacattttaaaaatctcattcattttaagtctctccacttgaaaagagttatattggaccacatggggaaaaaaccatatacataattccccattgtgctgtcataacacttgagagatgattaatactaattctaatcatatacagtccttttcctccaaatctgttacattcactgaaaacagcattagtatagactaaatgatttgatggttttctcatacttacatagtatgatctcttttttccgctgcctgtgaatctggtataacatcctggagttcacctaaataaaacaaatattataatattttcatttttttcatgcagttggcagggggatagggaggttagtatagaaatctataaaggttcacatattgggatgaacggattgatcgattttgcatcctctctcttaaacccaaacttctggggaacaaaggtggtatatttccttgtaacctcaaaaattccttgcacaaagtcaaacaaattctttgtaaatctttttcaaatcaatgaaagccagtggggttaaatggtaatacagggagaagtatatacattttcttaaaaaaatgactaaattaaaccacaaggtacttactaaaattttggtttgggaattcaacattcttattttctgtgttttctacacacttagcagttttgatatgctgtaaacacaggaaacaggttaacgtaaacttaagatgttatatgaaaacctaaatgttacagtattaaggtttgagtcttttaaaacaaatctgccttgatatgaaaagttggatactatttttatatatttcataaacgttatgcccgtttttgaatattccctatcctgaaacacaagaagaaaactgtcactgcagacgaggcagaatattgcataaattttctgatcacatccatagctagcataataattcagttttcatctgtaactgacaatttctagactctccatgaggaatctctcctgctgctgttgattacatagcctgctttatctattttgatatggtccattctttctttcttatatttcacttttcctgtttcttcagaattatcatcagatatcgaagaggacgatttttgtttagctaagttttttatttataacaatatctattgcattacccaggtaacttctttcctacagcaagcttccctatttccatagccaaagataacacttaatccagatcaaatacaaatctgccactattatcagaaaaatattccctttagtctaagctattttgcctcatcctggctgcctttccttcttactctagccagtgattctccacactaggaggggaacattatggaaatatgcaggtgtggtttgggttgtcacaatgacagaggggttctcctgacaataggtaagcacaatcctagctaggatgcttatcatcctacaacatttaggaccatgtcgcacaactgaaaaataatccccttattaagaaacacttagacaacttgaaccattactttgactattttcttttaatatcttcaactctcataccctttatctttctaccacatacccatttaaattaaaaaaatagaatccatcatctgttctcatcttactattaacaccaagactactaagctttgagaaaattgtacatatttatgaacatatttatgctataaaattcatagtcatatttaaactgggtcaacattgtctaacacttattcttaggcctctccattaccttgcacatagctttacatgtccctgaaccctgtacttcaacagatctccaggagaaactcaccatcttcacacttcagaaaaaacaaaagctattagatgttcctcctttacaagcttatctgcatcgctgatcacctcctgtttctccaagaaactattctctcttatccattcctgctttgtcttttcaactacctggaacaaatgcccttctcctcaatatccatttgactctttattgacctttcaaaagtcaattcattctccatattttcttaaaaagcatctcctgatcttcaccctcacctctagctatggggttaggcacttgaccctctaacttggttcctactgcatcctatatgtgtaaatctgagaatgcttatgtaacttagtatctaattttcatgctaaattttgagaaacttaaggacacagtccacttgtacttcgcattcctataccagagtcttccccatagtagtcaccaatttgtataatcaactaaataattatggcaggttcatttatgctcccaaatgtgtaaatcaagttatagtgaattaatattcataacttttattgtaagcacagtaaatgagtcatatgccagaaggaccctactttcaagggcaataaatatttaggggaaaaaaggtaatgctttaaacaaaatgagacacttgcagcttgcaaaaggagttagctcaatacatatttccacaattacttgaaaaaatatttttaaaatactttcaaggtaaagttactttgtctatattatctcttctatgtcttccttctgatgatctagatttcagtgatgcagcattatccactctattttctgatgtttgagaaacactaggtttctctgcagagctcgtcatttgcagtggtggtttaattcttcttcttcgtggtggtattgctaaaaaggaggacaaggattgcagatttttctttttttacctattgctattattgaggtacttttccaatgagaaaggtaagaaacgaacattcttagatggttcccaggtttctggcttagataattaagtgaatatagatgccatctaccaagataataagtgaaggaaaaatttgcaggaagggtggaaagattaatttaattttggacctattacatttggggagcctgtcagatactaagcaattggccagtaggcaacaagatttttagaacagaaggtcaatgttaagttgtcatatagactaagactttaactagtacacagtatcaggttttttaaaacttttatttagctcttagtatgtatcaggcactgtttaaagtttcactaggtaacttattaaatgagtgatttttatttaatcctctaaacaacttgataagatagatacttaagtgccacttatagaaaaaaaaactggttctaaatttagctagaggatatctgtacaaagtacacagctggaagtggggagctaagtccacctggcctggttaattcagtgttttaaccagtaagatatgctgtgtcctgcttaaattataataaattattaatgtcgaatattagtattttcaacactgttctgttcatatgttagcattatacttttcttcccattagaagacatttgtggttcatattttatcaatttttatacaccaaacttatcctttatgtaaattatgttcagaattgccttaaattaaaaaatgcctcctttaaaataattgttagaaatcttttaaaactataaaacttacatgtgttgctgaaaagcactggacttctcatagtgtatctatctgcaccagaaacaatcattgatgcttcagacatttttcttttgctaggagtagttttctgaaaccacgatgaaaaacaaccactgtaaacacagtctttttgaaattaaatatcctacaattttacttataacattttgccttgatacatgccaaagatatatgttttttaaataaacaacacaatattcataaatttccatgttttaggctgatatgaaaggttcatcttcatgtttggtattaaataagtagctaaaacaagtaaggaacattgttttaaagaatatttatagaatatccatgcctatgaagtacagtacctttatatgctagctgaaaatattttatcaatattgagtttatctagttaaccatagcttgcaatttcctattctatatcatgaggataatgtttggattacatatttatatgaaattattttgagtgctttcatgttaagctttcttcaaaacattcacacatttttgaaaattgtactaataatctgtgaagactaaactggagtgaagtagctgcaggaattcatagattcagtggcacataatctagtggttccaataaagatttgttttctcccatatcatctcacactaatttataagagggacagaagtagataagcagaggcagggactacaagagacaggagtttcagaggatgccatattaagaagtagatggtgacatactgcatagaggcataaaagagctggttttaaggcacctgtccctagaacaggggaaaaaatgatacagttgtgagtgggtatgtatatgaaacgtgagggaaggatggaaaggataagataaaagaaaattctaagattaactagaaaacaagcttctgagccaacagatttttcttagagaaattaagtttttagtggcatagtgaatggaacctgaacagttacttattcatataaatgcctcaaacagttcatccttattgaaaacagagcacaggtatttaacagtagtatggtgtttttcgaactttggtgtgcttaagacctttccaagagtttaagattcaacagatttaaggtggggctaagaatcagcattgttaataagcacccaacatgattctgatataaagacaccaaaaatagctttcatgtgctaattatctcggggaaataaatgacacttttaattgagaacaaaagactaaaaaacaaaatagtaacataaacatgccaaaatatatggaagtgcctgtgagagttatagttacgtaaaggtgagagattagtaaaaactgaaataatcaggcaaagctccacgaagaaatcaaaaaatgggccgggtgcagtggctcatgcctgtaatcccagcactttgggaggccgagaagggcagatcacctgaggtcaggagttcgagaccagcctggctaacaaggaaaccctgtctctactaaaacaacaacaacaaacaaaaacaaaaacaaaaattagccaggtgtggtggcaggtgcctataatcccagctccttgggaatctgaggcaggagaatcacttgaacccaagaagcagaggttctgggaggcggaggttgcagtgagccgagattgcaccactgcactccagcctgtgtgacagaacgagactccatctcaaaaattaaataaaaagaaagaaagtggaagacagtgtggtgattcctcaaggatctagaaccagaaataccatttgactcagcaaatcccattactgggtatataccgaaaggattataaatcattctaacataaagacacatgcacaggtatgtttattgcagcattattcacaatagcaaagacttagaaccaacccaaatgcccatcaatgatagactggataaagaaaatgtggcacatatacatcatggaatactatgcagccataaaaaggatgagttcatgtcttttgctggcacatggatgaagctggaaaccatcattctcagcaaactaacacaagaacagaaaaccaaacaccccatgttctcactcataagtgggagttaagaacacatgaacacagggagaagaacatcacacactgggacctgttgcggggtgggggcctaggggagggataacattaggagaaatacctaatgtagatgacaggttgatgggtgcagcaaaccaccctggcacgtgtatacctatgtaacaaacttgcatgttctgcacatgtatcccagaacttaaataaaagacttcctacaaaaaaaagatatgtaaaatgttttaaaaaggaaagcaaaaaaagagaaagtgaaaatgaacaagacttgcaaatctaagtatgctttagatgggtaaaggtaaaaaaataaataatgttaatgaagatctagaggcatgaatgaacatggcatgcaaagagacagtaaagcaaactaccttacaaaaggggagaatacatactacagttttaatagaaaaggtaaaattaaattatagaaagtctcagaactgagccaaaatttattcagtcagtgggatgaacacagaaatcacaaaacttttggagtagaagaatgctatcaagatactgatatttaaggaaaatcgctgatttttcaggtatctcataggataaaacagtggtgacaaagtcctacgaggaggctactgtattaacctaagtgtgctgagatgagtaatggcagatgaaacaagaaagaatggatgtgagacacagatactatgaaagaataatcacaagcaccttggttccagatataaggggagaagaggctgaaataaagcatattgccaaaaaaaatgaacagtagtattactgaaatacagacagatgcagattttagtcaaaagataaaatgtttgagcttagacttcaggaaaggtcttggagagacatacaaatggaaatacagaaaaacaagtagagatgcagctatagaattttgaagaaaagtctgctacattttaagagctcacattatgaacatgaaggaagctctctaagaaagaaggcaacaagatgttccaaaagctggatatcaaggttttgggtttagagcaaacctaccaagaggtatggagagaaagtttttctaatgtagtaatagaagcagaaagggaaccgtggtatacaatggaagctgaaggagcggaccttaagaaacagggggctatcgacaatgtcaagtgtcacagcaaggtatggtggtaggggttccatttatgagaaattattctcttggatgtgacctagaggaggtccttcaatggaaaagaaaaggagtaaaagaaagaacctcatacttttttttttcctcatgcaaataaacagaacattatacatttctattctacattatagccaaatgcaattatagaacaaaaaggatacattcaagaaggttatcttatctatctctaatctgcaatttacaactgtaaagtatgtcttgttctaacccctatacatgtacacaatttgctaagacacacactatcttttgtttgcatttgtcaaaggtaggagaaacactctgaaatgtgattgatcaaggccaataatatataaattctagatgcttctttcagtactcatatataacagtgatttgatcaatggtagttttataagccagtattttgacaccatctttacctcaagctgactattatttctattccctttgtcactgtttttgatatattttgaaggtttagcaaattcctttggggactttgatttttcctttaaactaacgagctcttctccgactggtgagatttgactttctggcactagaatctgttggagaatatgaaaaaaaaagtatttaaaactgcaaaccacagaaagtaatcaacaatcactggatgtcttaagctcctactcatctcacatattcaattatttcccttttctatccatgtgctgttataatttttacaaagtgatccaataaaaagtatccattttttcaaactctaatagacataaaagaagcttgacattaatggaaggacatttactgcttttttaaagttttaaagttactaaactgatatttattaataaccctactctttacactaaaattatcattaataacatgtttaaacatcatatacattttattggggtactgtttatattgagaccatttgttttctatatattcaccctccaacaacacctttattactgttccattagttatggttaaacttagcccagtgataaaaatcaagtaagtctgagacatacctgtgatccacttgcgtcaaaaagtatatgcagcgacgttttggcaactgaaataccttgttttctgatagattcctaaaattaaatcaattcacagtgatgacattttcttcattttctttccactttttcatatgtcattttatttccatttaatgtaattatttcctgttttcttccaaaattgccaaatatcccaaattattactttgcatatatgaataccttctcagaacacttcaattactcccctttaaccagtcaccttagcttgtcatttgtgaggaacaagggttcctcacaaatacatctaatattatgcaacataaatcttttgcactattcaaatttgtcaattgaatatctccccaaaacatcacatgaattgtcaccttagattctcagttaaacaatatttggctcataatgtcttccacatgcctggaaagtattttatctaaatgctttccttcaacttcaaaggccatttcaagtcccatatccataacaatgctaacctccaaacctgactctttatgagcattctctttcttcaatgtctacaactcatgttccctatgccattatttacttcttctgatgtatcatgtgtgtaattctcacgatgtttaagatcttgaaaacagtgttttctctcattttactttttaaacacctggcagaaattcattaaatgttttgagcagctgctgctaattttgtcatctgagatactttgtaatgggtatctcaatagatatgactaacaagctgatgactcttcaacagtacaaatttaaagaactaaaatctacattttaagaattctagaaaggaaaaaacgcaataaaacttataacgccaaactgtttccagaattatgaaaatagtaaatatttattaagtttaaagacttaccctatgtttagttgcaccaaaaattttttgagttacattagtgatttctagtgatgcgtcaaaatacaaaagcaattctttcccttctcttttgctaatttttactgtatttttcagaattattgtcagtagcttctttgattctctcactgtatagaaacaacactgattagtttacgtttctatgatactactctgcaagtatactataaataagacatggatgtagcagattaattgaatcaaaattcaaattctcaatattgaacagtgtttaaattaatcaattctggcactacttacctatgtaaatcaatcaagtcaatttagctttcctagtctcagtgttcttatctataaaatacaggatatggctataactaataagatagaatcctaaatacattctggactctaacaaattcttaataaaatattccttgaacacatctgagaatactattttcttaatttaaaaaaaggcaaacaaaaacaataactttaattccatataattaccatatttctagacatacacatataaacatttctattaaatccacagttgttataacatgctgacaataaacaacatttgacaaaaattaagtgtcaggagattgtgaggtgagaaggatctagcacttggcctcaatgaacttaccaatccagtaaacagagaatacagcaagtaccagcttataagaaatagtcacactctccctccctacaaaagttaccaaaaaattacctggcccctaataaatgcacctgtattatagaccagaggccaccatgctcgtgtcctacttgtggcaggaattctattgctgaatgaaaagtctccaaccctgcccacaatgtactttcgggcaagagaaaaacactctgaaggagcaggatcacacaaagtagggaaatttatctctacatctgaaaaagctctgcaggccacgccatgatgtggcctaagggacaaatgtcctataggctatgaaatgtcctgattcttatgaggcctgcccaagcagaaaatgttttatttgcttttgcaaatatatgctcataaaactttcacagtaatgacctttgaaggtactaagaattaacaattgcttgaaagtggtaaccatagtttcaaactcaaagagcgctagtagttttttaaaagttaaacagtgacaagttttcaggtttcagagatgcaaatttaggtggctttaaaaatgatgtttcatgttttgatgaaaattaaaacatttgtaattcttaggtctattgctgctgattgttttattcctctgatatgcttttgactttttttctatagcttactgtaaattatattaaatgtaatatttgctttaactccttgcttgcacatggtattagaactacttcaaatttattattttgctgaatgctttgtgcctatttgtacaaaaatttgtctacctatgttatggctacttacatagaaatttatgaatatttgttatattttaatgattgctttgttgaaattcctgatatttgctctgtctggactatataatggcttggtttcctttttaattagttagtgttactgagatacaagaaaactttgttttgttgcttgctataaaatccaagtatttatggatatcaatatgtcaagattttataacataagaatgaataggaagagaaggaaagagtaaaaactattctctcaaaattagctatgaatggggagaaaaagatagcttcaggaagacataggataaaagtaggctttttgttttatgatgtagacatttgagcccattgatatactgagagaaaagaggtactgagagagaggaggaagatacaaaaaatatgaactgatggagcaaagacttggagaatgtgtgtggagaacttggagaaattacccttcaacaagagtagacaaatatcttctgtttacaggagagataaaggaggatacagatacaaagatgtttggagacggagggtcaaaatgtgtaagtattcttacctgaaaaattcatgttcttctgaattaccacatcatagtgaaagcaaaaaaggcaaggttaaggataacttaaaaatttaaatagcagctgttagacaactggagagggatggcaactatggacatggaagactgccaagtagcagtgagagtccaaagttggaagctggagacttccacttctggggaaaatgtaggatattgtggcaggctaatatcctgttttaaaaaatcagaaggattaaaatatcatatgtttaaaggtgtcagagagctgtacatgtaacaagatctctggcctttttttctctaaggaaatttgctaattctgtttgtaggcttaagaagagaacctctgctggagaaaagaagacaagcaagtatttagtgagcagtaatgcctggagtaacaaataggacacttaaaagctttaaaggcataactaattttcccttcattctggggcagcacaaggagctggaccaaacctgataaaaggcagttaactctcttatagtctcatgggcttggaatcaatgtactgcctgatacaggtatcatcctcaggcatatactcagtgttccgttcaaaatatctgccagattttggactgagtagagtgaacggctcgagagctgagctggaaacctctaagaggcagaactgtatcttccacagtctctcaggttcagaagacacaaatctaataggctcatcatcaacagactgggatggccacacctgagtaatagaggcaaacaagacaaagagtaaatttaaaactagaactaaacacagaccaacatccatgactggatcagtccttcagcccctctgcctaagaagaaaaaagaaactcttctggtggaaggattatctggagcatctattgttcctgtatatgcattatctatcataaaattacttgacatccatagaggcaacaacatatgactgatcgagagaggaaacaacagatctttttagaagaagactatattagtctgtattagtctgctataatggaacacctgagggtgggaaacttataaaaaaagatttatttggctcatagttctgcaggctgtacaggaagcatggtgccagtatttgcctctgatgagggactcaggaagcttttaatcattgcagaaggcaaaaggggagtaggcatatcacatggcaagagagggagcaagagagagatgggaaagtgccatataaataactagcttacctgaattaacaagagaaattgtcaccatgaaataattatagaagaaaaaataatccccttcaccctcaacaccaacatcataaactaagcaaatatgtctgctcttttaatttctactaacattgtactgaaaattatatagccagtgcaacaaggcaagatggtaggagggactgaccataagaagtgttagaaaggatgtagaacaaatggaagtcttataaactgatagtgaaaatataaaacggtaaaatcactttggacaacactttagaagtttcttcaaaagctaatcatatgcctatgggtctgaactaaccactgaacttcttagtatttacctgagaaataaaaacatattttcagaagtaattaattataaatgaatatttacagcagcatttcataatagctaaaaactgggaacattacaaatgctcactaacaggtgactacagaaaccagttgaagtatatctatacaatggactaacactcagcaataaaaagaataaactactgatacatgcaacatgcttgaatctttttttaaaaaagtgttctaaaagaaagaagctggacaaaaattgctacgtactgtatgattccatttatataaactctagaaaatgtaaatgtatcaaagaaaacatcagtaattgcctgggggtagagtacaaggatggatagattaaaagaagtacaaagaaattttgggggtgatatgtttattaacttaattgccatgatggtttcatgtgcatagacaaatatgaagagttatcaacgtccttaatctgatgaaggttatctctacaaaagacttttggctaacattatacttaatggtaaaatactgaatgttctttcctaagcaaagattgggaagtaggcaaagatgtccacttttatcgcttctattcaacattgcactggaggttctatacattgcaataaagcaacaaaaggaaaggagggagggagtgcataaggatcagaaagaaagtagtaaaactacctcttttgcagatcccatgactggtaaaattaaagatcaattctatttataaacatatagactgaatacttgggaacaaattcatcaaaagacttatacaatgaaaactatgaaacgctgttgagagaaatcaaagacctaaacaaatggagagatacaccatgtttataaactagttatgactgttaacatgttatttctccccatattgatctaaaacctgagtcataattccagcaagcaattgataaaccaattctaaaatttatatagaagctcaaaaggcctataatttccaaaacaatattttaaaaaaccacaatgttggaagacttatactgactgacttcaagactaaccacaaatctaccataatcaaaacagtgtggtactgacataaagaaaagtagacctatgataaatagaacagattggaggaccaagaaatagacacactattacagagtcatgattttcaacaaagaaaccaaagaaatccaatggaaaagaaaagcctttacagcaaataatcccgtaataactgcatatctatatgaaaaaatgaacctccaatctctgcatcataccttaatcaaatattaatttgagattataatactcctaaacataaaagctaaaactataaaatttttgtggaaaaataatagaacatcttagtgatttaagagtcgacaaaaattttttgggtcacggaaagcaataaccataaaaatagatcaagtagatttcaaaatttaaaactgctcaccagatatcattaagaaaatgaataagcaagatacaattttggagaaaacatagaacatatatatgtcaaaggagtggaatctaggatacctaagaactagatagtccaataaaaaatgaacaaaatatttaaaatatatactttacaaaggaaaatatatgaatggccagaaagcacatgaaaaagtgctcagcatcactagtcattggaaaaatgcaaataaaaaacatgagatattattacatgtctattgaaatgataaaatatgtcttaatatctaaatttgtaatagtactagtctgattttgtccactagcattatgcagttccagttataggattggagaaaccagatattcagatttaatcaagcaaatgggatggaaggtcaggagccttaaacatagagaccagaatgacaaactggatcactggttttagactagacagggaaggaggtaagtacaggggtagagctgggagattagtagggaaacatgggatcaaggtgtttgatgaatttctgaatgtgaacctctgaaaatattgattttgctttcattagtctgttttgttaacccagaaaggatgtaacatttgttccatatggtaagaattaagaaaattattagaaaaaaacaagtttaataccttcaatgctgtatatttgtactttttcctctggcacagtaactgcttcccattgatgatccttaaatttaaaagcaggttttggccataaataatttatttctgatttacagtttctttaaacatcaaatttcaagttacaggaactatgaattctttttgctagtcactaagtaactagtttatataacacctttcttgctccaccaattaactacatattacacatgttatatttaatgtatttgttcattattaaaacgaaatgatgattttgacaattttctattcttaaccaaaaaaaagaatgactgttaatattatatttattagaggataccctttttaaaaatgttaccaagtctttttatgttttctttgaaatattttatgaagtcatactcattcctcaattcccactcctactacctatcccaggtcctgtaaccacaatactcattaactgattgtcctttgatttaaatatgaatgcgcatgaataataacctaaaatgtttgccccaagtattttcactgaaaatgtgtataactgaatgatactgaattcacaaagttatagtaaaaattaaataccattcctggccaggcacggtggctcacgcctgtaatcccgggactttgggaggccaaggcaggcggatcacgaggtcaggagatggagaacatcctggctaacacggtgaaaccccgtctctactaaaaatacaaaaaaaaattagccgggcgtggtggtgggcgcctgtagttccagctactcaggaggctgaggcaggagaatggcgtgaacccgggaggcggagcttgcagtgagccaagatcgcaccactgctctccagcctgggcaacagagggagactccatctcaaacaaaacagaacaaaacacaaaacaaaacgaaaaaaaactaaatacttttgttatttaaggacaactcattcccgagaacttcctctaaatccttactattttcaccaattcccttctctcctataccttaattgaaaccagtcacaccctgatgacatcaccacctttttcccttacctcaaaacctcaggatcaggaggaaagggacagtattctaagttttccccaaggctttgagcagcctcctatttctgtgtgtaaaaaacttgctcctttgaggaatatctcagttggcatactctattcccaataattgttatcatctaccaacttaaaactgattcttccttatatatcaaggcacttagttcactttttaaaaaaacacacataatggcaattttcaaacagatttttaatcagaaatcatagtattataaacccaaaatatgcccttacccagattcaacagttatcagtatgttgtagcaattttgttccattttcacctcccactctccattatactccttcctcctgacctcaattttttccttcaacctctccctatctgcccttcaccatcaatttatgaaagctcttatccttaatatacccaaaaaaacccctacattgaatccacatgtcacgctctttccttaacttgatgtctttacttccttaaccgatattttaactttctaggaatgcctaaactcttcaccatgtaagtgaaactgctctttcatgggttaccagtttttatttaacctcccctctcaggaatatttcactgtgttgatcatttcctctcataaaacctcctttcctttgtcgtccgtaacactatacccttttaatttgttcccttttggccgattcttcaagtatccttctggctaaaatctcttctacttatcctgtagaaatttgtttttcatagttctttcatataggcactcattaaaacccatggttctgtcatttatatacagatagcttctatatctctacttacagctcaacttccatccagctacccaaattttagtaatccttctttttaaaaaattacaaacaaatcaccaagtttgctcagttctgtctcctctcaagtctttctggattctatcaatttccatccatgcccatcgttatatctcaaaaccatcccacaattatttctcacctggattattgcaaaagcctcctaactgcctctagtgttttttctttttatccattctccccagtctatttttatccatttcccctaccaggggggatcttttacacaaatgtgttctccagtgcctagtacatacgtgacacatagttctcaatagatattcattgaactgatgttacctcctacttaaaatcctcctttggctccacacttcctatatttttgcaatcccctatgccctctgtacatctttcaattctttcaatgttccgtttactcattcttccaacaaacatgagccactgaatagctataaactaatcttatactctatgcgggaaagcagacaacaaacaacaaataaacaaaatgattttaaataataactactataaaggaaataagacaatgtggaataatgtggttgtgaggctactttatattgagtaacctgagaatactctatgagaaggcaacatttgtgcttaaatctaaatgggaagaactaagatgcaaggacctggaggaagaggtctatgcagaagaactaagaaagacctaagatgggcataatctgtgttagagaaatagaaaaataaatgtgactggaacacagtcatcatagaaaatatatgaaatatcagagaaacagccagagaccaggccacaaaaagccttgtatgccatgtcagagagacagaagaaggattcaaggagccactgtggagaatggcttttatggagaacaagagagaataaagggataacatactacagctacggaaattcagaagagagaggattctaaatatagttttggaaagaagagtcccccagcatcttgatcagtgtctggaacacactaggcattaaatacttataaatgcattttatactttccctatcatgtatactgctatagtgtaattgcttattttttttttttttttttttttttttgagacagtctcccactgtcgcccaggctggagtgcagtggcccgatctcggctcactgcaagctccgcttcctgggttcacgccattctcctgcctcaacctcccgagcagctgggactacaggcgcctgccaccacgcccagcttatttttgtatttttagtagaggcggggtttcaccatgtttaactgcttattttcttatctcaataatccattagaccaaactgaataaaggaacactgccctatttatttcctttatagtagttactgctatttaataacaatacttttctcttctcccaaaacgaaattctattaggctggtgcaaaagtaattgcagtttctgccactgaaagtaatggcaagaaccgcaattacttttgcacctgcctaagtagctcctcgaaaaaaaatcagcttaaaacactcctacaaatcctgcaggagaaatatactaatggaaactgtcagtgcccctgagaagcagtgctagtcattggaactcaattttaagcattctaagaaggtactttaaaataaaaagcaataaaggcatgtggaaatcctaaaaggcatttgattaatgttcatctataaaatgtttacctggaacaaatggcaggattctataagaaacagactaaaaagactaaagccttattataatatcaccagccacaaccagattagtaaatgctgatcaactcttactcagattttggcaaacggactgcataatttgagctaaatgtatgcaaatgtatcaaatacgaggtggtagctattatgaaataatggctcaaggattttcctcaggtaaaaaatatgcaggtcagcagaaaatatgccacctatttggaagatctgagcacagctatgataaagcataggaagaaaaaaactaaaattaactcccactcaagtcctatttccaaagagaaggttttatgaatgattaagttaggtccacttgtcactgtctgttaatattttcaatagaatgccactgtatttgagtaacttcccttttctaaagtcaattcactttgtttatgtgaatacaaaattttaactgtcataaattaacatttattttttaaaagcttatgttaaaaaatgagcattaaaactcagcattattttttcttatacaataaaacatcagaagtagttttcatttataattagcttggtaggttgctatgctaatcaaactactagagctaatattaaaatctaggtaaagactggctagaacatataaagaaatccacattcttaaagtaagtaaaaatcttatatatgcatatacataaagaataataccaaccaaattaaacttacatcattatctccagcaatgtagaatgagagagtctgactcccaagattaaaatcaatccaaaattcctcaagtttttcatctgatggtatttgcagctaataaaataaacatacaaaactggaatatacaatgattttagaaataacagacaattatgatgttatattcatggctaaagcaagaaaacaaagctagaaggagagagaagagaaagaacagacaagtataatatttagataaatttaaaaacaatcaaatgaaatgctactttaatattttataaaaaatcaactagctccaagaaattatgaatattccaagtgctaataaaggttgaaagtactagtttgaatagattcatacatgataaatcaataatggtcttaaggaaacacgagaaaaactggactacagcctttatttttcagttattcttggcaatgaatatgctgttccataaaacttctcctggtttcactgtcagatacagaatactagaccagctacattcatgatctaattacaactatttttagtgttcttattcatttttaactcataattcacttgactatcaaaattcatgcaataactaaaataatgtgttaaattaaaattttacctcatatttatcaagaaatgctgataaacaaggaaatgtaaagaccctgaaataaaaagtagtttaagaaaaaaataaataagctttcacagcataatcttgtccagtaatagaaatcatgcctagaatcaaaaggaaatcaggcagtggtcataataattgaaataaaatcatatttccctctttaatacttttcaaaatacatgtttagtggacatttatgtagagaaaatcatattactttgacaatactactcaatctaccattctgactaaaatgattgcaccaaatgtttttgtgtgtgatatggtttggttctgtgtccccacccaaatctcgtcttgaatggtactgtcataattcccatgtgttgtgtgagggacctggtaggagataacagaatcatgagggcagtttctcccacactgttcttgcggtagtgagtaactctcacgagatctgatggttttatcaggggtttccccttttgcatcttcctcattctttctttgcctgctgctatccacgtaagatgggacttgctcctccttgccttctgccatgatagtgaggcttccccagccacatggaactttaagtccaattaaatctctttcttttttaaatgtctcagtctccagtatgtctttatcagcagtattaaaacagactaatacagtgtgctatcaaatatgagcagagtttcctaacttagcttattgtttccatagaacttaaataagaatacaagtgaataattacattaaaaatggttaaattcacagaattctttcttagatactattttacatagttagcatattatctcattttaatctatatcacaaacatatgaggtagttattaatataacagctaaggaaactgaggcatgtaaggttaaataatttgcccaatattagaacaggaagagaggaacttatgattcaaatcaggtaatatgactccttgcacaacccttacaataccgttaatttctttagtaagtaaaataaatgtgaactcattcatccaataattatgttgaacatctatgaggtgctaggcattgcaaattctgtttttctgtcgttataaaaaaaagattaaaatttatattacacatcctttcatgcccctcagaaagatcctacttactgtatgttaattataaaggaagatgatttgtttgctatatatttacattccagtatgtggatgaaggagatgattcaagtaataaatatgtctagatttttattatccctcaaacattaaataataatggatatgcaactcagaagtatagtaagccaattttgaacatctaaagttattaattaatatgaattaaacagaaatgaacttttccctctaaaaagtacaaaataaaacaaggccagtgcagaattatttcagattactggtgtagtaatttgctaaaatcatgttattgttttaaattatctatgcacattctacactccaacatagtgtagagaacaagaataaagttaaatgtataaagatgcaacactgggtgctcactcttgagctctatttatttgacagtaaatggttgtatcttgcattaagtttaccttcttttgtctccaagcatgccatttacaaggttgagaaatatcctgcaatcctaattttaaagagaaatacttttaaaaatcataataatttttaaaaattcacgaatttctgttattgttatacaacttactgtttcaaattcagagtccttaattcttttaaatgccttagcaataaaatccattgaaaaccactgatgtgccagttcttgtctttgtttttctgtggtcattctacacaaagcttctacaatgcctacctgtaagtcataatctattaaaaaaatagttaatgtttgatttacaattatgaaaattaagtttataaaagaccatatattttacaaggtattagaataagcaagagaaataagaatatattaatgtaattgattaatctattaatattttcttcatatggattagaaatatctcatcatttgaggaattaacacagcccaaataacaagtgtgccaacagaagaaataagtaaaatttaaaaaaatgttgagacttctaaatattcaaagacactgccatttcattattattagagatataaaatgcaaagtaacccacacagttgtctgtaagttacaaagtctgttttcctcttgtgtaacatgtttacagttatcccagagtactttaaaccatgatttattctacatgtaaatcaccatattaaaattcattcacaaaaagcttagaaaataaattttaagttattttaataaacacattgtttaaaaacaaatccatcaatatgaagaatattagacaccctaatttcataaaaaaatctgaggaatttcttagcacaagtagttcaggtctactgaaaaattaagccattatattaagctattatattaatctattaatttaagctttattaattaagctattatattaagctattaaattaagctattaatttaagctattaagctatattattcataagtctaccattaggcacaaattgtatgtatctaacgcctactgtcataaattatttttgtcccagacaaatttcatgtatatttattaaaaattgcttaattgtacataatgtttataattccctcagtctcacattgctatgctaatatttaaattaaaaagatactatctgctattcataaatatggaataattttagatttggaaaagacatacttacctccagcatctaaaatcctttctcccatactactcctgtgaattaaaataacagattacaaaatagaccagtatcaattaaataggaagtccacatgtttaggaggaaaagaaacttcacaaaaatttacaattggctaatatcatcgacttttgcagaaattatatgcatacactaaattatattaaaaagctgcaacagtttatcagtttcattattaatgcaaactcatagttgtctgtcttataaaacattcttatggattttaagaataaaaaccatataagtacagattattacatgagaattaacatttcttggttagagagtattttccgggcatcttgaggcattttgtcaagcatagcattcattttttttataatctagaaaagaaaaaaagataatgcattaactttacattcagtgaaacactattaagagaaatattctaggcacataaacttagaagcctaattttttcttaatcactgagttttattatgggaatggagtaggatggaggaaagaatatataaagtataaaataggccaggcatggtggctcactataataccagcactttgggaggccaaggcgggcggatcacttgatgtcaggagttcgagatcagcctggccaacatagtgaaaccccgtctctaccaaaaatacaaaaattagctgggcatggtaacacgtgcctgtaatcccagctactcggaagggaggcaggagaagcgcttgaacctgggaggcagaggttgcagtgagctgagattgcgccactgcactccagcctaggcagatagagcaagactctctcaaaaaaataaaaataataaagtataaaataatgaatataaaaacaacataaactatagaatatcaaaaatagaatataacatgactccgatacttaaagcacttgtactttttgcaataaaacttgtatttattttaactccattataagatctgaggaagccaaaaaatgttactttattttgttcttatgattatagtacatgtacacacatacatatactaatacagattatttttagcatttaaatacttaagcaccccaaaaatctggttggtataatttatttccacttgagctatatgcacacataaacccatatggttataaattttcagtaagtatttcggaaatatgtcaggcaatagattatgatagaaatatactccaagctaagtaattttgtcctacatgaaataaattgtcaatttaattgctattgattttcttcacgttctcatttttagtttttaaaacacaaataaatgactttacctcttgctgaatacaaatattcactcttgagtcaataaccagggaacaaatgcgaggtacgaaactttccactacttgttttttacctgaataaaagtgttaaattattgataaatgttcatttcaaatcctcttaactgtcagtcttttcttataagagttagtggaaaggggccaggcatggtaactcaggcctataatcctagcactttggaaggcccagataggtagactgcttgagcccaggagtttgagaccagcctgggcaacatggcaaaatcctgtctgtacaaaaattagccgggcacctgtaatcccagctacatgggaggctgaggtgggagaatcacctgagcccaggaggtcaaagctgcagtgagccgtgatcgtgccactgtactccagcctgggtgagagtgagaccctgtctcaaaaaataaaaataaataaagagttagtggaaaggatatactactgcagttcagaagaaggcccaccagggcttggggatgagaaagaatgaaattaagtcctaattctacttggccttgcaaaaaacaccactcaacaaatgtgactgattttaatactgtcaagggacaactctagatctagtttctaactgcaggcacataaggaggtatttatttttttttttagattaagtaaatatagttcaaaattgaaaacttcaattctaaggcttttaccaaaactgacctcattaatttttagttatacatcaaaaatttttatacccataaagaccaacacatcttaaccccaatgaagttctaaatgatgtgagccccttttacgttaacgcatttttgaaagatgaggctttatcaatactaagtatattcagaggaatgtgtacatgctgtttcataatgcaaattttaaaaataactttaaacaatggaaatactgtaacaacaaatgtacagttttccaaagtgactgcataaaaagaaaaaagtactcagatgaaaagatacaattatttactttaaaaatcaggtggatcactttacaattgctggtgctttaggattttttccctaaaaacttaaaaatttagactacattgttatgtagcaaaaacaatcaacgaagaggtaggattaattattatttaaatcaatggcaatctgtttaaaactttttggctctgaagacaacaagtacctttatttataaataattcaccagcctcattgaccaatcctaggtaagtcttcttcaatcaacacagagctaaaataagttggatctgattgcttggcacaagcaggccacaagtcaaagaatgagtaggaacatattctgtattctcaatttactattgaaaatttgttccattagatcaaaggttggcaaactatggcccacgaactaaatgcaactcactgccagtttttgcatgactgtattactcaccagcaagtgctctgtgaaaactatttgaatctatcatgttttattaaaacagtagtgtcaaaggtgaacatcattcactcttgtcagtttacccatggtcagttctttgaatttttgtcagaagcagaagctgagtattctgactttccctaccacacagcagtccaatggcagtggggttttattgtgactttttgatatccagcaccaagactgaaatttttctgaacaagagctgtcctcaacctttattgctgaatactgaatggctttggtaattagcactggctgcagagttgacaatgtttctaaatgaactgggcacaaaattacaagataaaattatgcttgcatcatgaacttaacactgcagtgaagtcattctgataactaaggtgatctgaaaggcaagcaatgctatgctgctttatacacttcacagactgtcaaaacaggaagcaacatctccatttccacacaaatttgcagggaatatattttttccaaactccaactacaggtctagcagtgtttttgggctttgttgtaagtacaaaggaaatttccacatttcaaaatccatttaattgtgcaactgggaagcttccacataaccttcaattggaagtgattaatttgcaatgcaatgacattctaaaatgcaaatgttaagaacctaacaattctattaatgcctttcaagtgatgaacacgctcaattaaaagcatgcttatgcactgatatcagtatttggcattgtctgcatgaaaagccattttctaatgtgacatacataaaacctcattatagacagggattaacaaatgaacatttacaatcaattttgaaaacagaacactaactctgaaccctaattaaatgaaatgttattctctcgcaaaaagaatgcaagtttcattattagtagacctatattacaaaaaattgtacaactattatattttcaatggcatcaataaattattcatagaaatttgtttttctttcttgttatacaagtaccctacataatattcttaattgtttttctcttggactacaaagtctaaaatatttattatctggccctttacagtaaaagtttgttgatccttgaatcagataatgagttcttaatactaggacaacacaatgggaattgtaaaattatactaaaactctaacagtaaaatttattgttccaatagaaaataagtgtttattataccttcatcactgacatcatgtatgacctgaaaaaaagtgaataatatttaatttacaagttactatatattacaaaccattacaatattataaaccattacaaatggtattgaaatgacagattacattttaactcagagcataattactttttattaactaaccatttaattatatttaccagaataaatgctttatacaatctgaacagaccaatccaaccaagtcaccaaccaatctgttagtgacttttaggctcagggcacagagaacacaaattgttttttaaataaacacatgctttataaatatcagtgtaatcaatgtgatttttaccagcagaagatcaactaagtcttctatcatatttagaacagcttcatcttttgaatttccttgactctgaataatgtccttggatttttcaaaccaggcaaccatgtaaaaaaaggaatgaacttattagagttccattttaataattttaagaatgtacttatctatctttgcataaacagtaaacctaggaataaagacacatcaaaattaaaattttagtgttgtatcaaaataaattcatgtttttaaagatcttccttgtttttttttaactatcttttcccattgtttaaaatgggaatagatgaagttaattttgattccatgtagaagatccttatttctccttcaaattcctagttagggtacgtttattataatagaaggaagtaaattatcatcacaatttagaccattttgatattgttactatatgaaaagttttcatattattttaccttaatttagatatttgagtacatacatctcagatactattctaggtgccaataatgtagcaatgaaccaaagagacaaaaatcaataccctacatgctagcatgggagacagacaaacaatataaaaacaaaaaatgaagttagataataagagttaaagagacaataaagcaagtcaaggccttagggagcttaaactcacatgattaccaaggagtctgtctttgtacagtttgtgatctttatatttgtaacatatatcacaagttatagaaatgttttattcccaaaattgtacataaagttcctaaatttattttcaacaatttggataatttcttactagaaagcatatcttttataatatttcattcacatgaatatgttacatattctatacttatcttttgtattagtccttgttttatcatcgttagaagtccagcttgccccaatacactgatatttttgccacatcttccaacagaaaccaaaatggctgaaacattgtggatatcctctttattaagttcctgaaataaaaggtatacattaaaatttctgtaaacacaaaacagtatgaaatagacattgtacaaggagtgttacacatatattttaatcttcacaaatcctgaaagatggtcattttaatcatctctatattgcaacagatgaaaatgtggtttaagaatgtgacctgcccaaagccatacagtcagggaatgacaaactcaggacaaaaatggaaatctgtataaatccaagaaactttatactatgatacaatgaatcagcaactttccattctaaaaagctccatgtatttaactaacagaaacaagaaatttttattcaatttcttggattcataatgaatctcagatactggggtaaggggattatcaataatcaccttttctcatgtatgaaaatgccttaaatatgattaaattcaaagtttggggtgatttttctatgttttagttttgacagaagtaggcattgcctatgtaacatcaagtatacactgataggttttttttaaaaatctatgaacttgtttaaacttcaaagagctaaagtattttttccccagtttcagccacagttaatagtaaagcccttgtgaacacatatttttgtatattttatttgggaaatgacattccaatgtgttgagattcctcaaacaaacaaacaataataagcaaatggtgaaataagcatttatttatataattatgactgagcttgcccaagcctattcatttttttctaatggagtacttccttctaaaactagagttctatctaataattgtaacaatcattcagcaaaaatgaatatttaccctgcatataaggttgtccaccttgtggaaaaactgtttgctgcatttaatcttcacatcttcacaaatatcaatttgcaaaagtgttttcaaaggtttgaaatcattttttcttaaagcatcatcaatgcatttttccaactgctagagaaatatatttaatggcacatactgtatcaaaaccaaaattaattaccttatgcaatctagtaatttgagaaccgttttcacatgaaaactctcaaatgaactcataaaatattaattcacgtattttttaaaaatatggccactattaaatttggaacaactgaattagaaattacatttctttgataatatgattagaaaaaaatattttattaatatttccaattcatatcttttattactaaggtcatctttatgtcaacctcaacagaaacttgatgaaaaaagcaaaaaaattttaaagtaacgaacacttaaaccaagaataaaagcctagcatacctgactactaatctcttaacggggttgaaatagtaaagaaaaaaatacataaagacaggcaaaagcaccttttagaaattatgccaactaacataaattaagcattaccattatataatatttataacattattaaaatctgccatccttgctattaaagtacaacttcattaataacaaatgttcatactacaacctgatcactaaacaggtttggctgtgaactgcatacatgttgaatagattattaacacttacactttacctaaatacacaatatcttaacctctaaaacttaatacaaaaatatccaagcataaattatgcatgaatcagtgcataattcttttcaatgtaaaaggtaggtataaagaatcagcatttttaatactttataaatattcttaacatagcttttgcaaacatctaatgaatacatgaaaggacactttatttaaactattcttgaccatttcataaaaacatgtaagctttatcattgctaaaaacatagcactgaatacctataagtaaacaaaaagtgattttcagaatgaaaatacttacttttggtctaggactacatacctggagatctggtcttattggcattttgacttcatttaaaaaaaaaaaaaaagcaagacaaaataaacacctataaaagaaaacatatattttctgtatctcacaatctgtttcatgtgtttatcagtttaaatatcttacacacataaatatgcatttgttatttataccaaaggcaacattaacttcctcactaaacacctgtttattaaattacacatttgaatatgatcaaataagtttctagagaaaagcctgaagatcatttagtcaagctcttcctttttatagattacttaaattaatgtcaaatatcctgccaaaaggtcacaaagctagttagtgaaagaataacctggatctccctttccagtgattccctgctatacttgttccacctctgagaacaaggaaaaaaaaaaactcttgaattaatgtgcaaatgaaatttgggctattaatattcaagaaaggaggaatatgcagatatactaacaatgaacaggatcaaaatatgcaaggaaaggagtgaggaaaagataactcaaatgcatttcatatgtccacaagagtgttcaggaaagaaagaactcccagtttctggttgaatgctgaaattaaggtgaggacctcactttcccaaagttatctgggtccttaaagaccatgggatgcaaatacaaataactgccacaaattaatatattgcaatatggctaatagaaaatatccaccaggttctaaagagagattccatgcttatgaaaacaggaccaaaaatagattaaatcacttcaaacaatcctatcttgtgtgtttctgacaaagatcaaagataaacgtcattgattctccctgccatgaacacctaaggaattaacattattttggtcaagaaaatgcaaatcattgctgtagtcttcctcaaagctctgtatccctattgtgttttgtagaatatgcataattatttgcctgtcttttttggaacaaagtactaaggttattctgagaggaaccatgtgcctgatagtattattcatttataaataataaagtctgatgattatgtttcttaccatctcattttaataattatgggaattttttttttaaatattgtatgttacaaaactccatgtctacaaaaaaatttttttttaattagctgggtatagtggtgtgtgcctgtaatcccagctactctggaggctggggtgagaaattgcttgagcctagaagttgaaggttacagtgagctatgactacaacactgtactctagcctagtcaagagagggagactctgtctctaaaataaacaaaaagaatgcatgtcatcatttctaaggtaaccactaaatgagtagtgaaagaatacgtaactactaagctaagtgtgaggagggaggctgtaatgttttcattttaatcaatccagagagagagagagaaacagaaagagacccagaagaagaaagaaaaacagacaacacaaagtaaggtgatagattaaaagttacatatcaataattacattgaaagtaaaatatattaaatactctgaagaagtaagaatgtcaccctcccaatatgctgctctgacatattgactattttaaattaaaggcactcaacaaaaaacagcaggtacaagatcactcccaccttcattctgtttcctaaaagcaggaaatgaaattcccatgtgaaagatgtcctctctataccaaaagagaagtaatcttataattaaggaggggaagttaaaattaagaaaatctgtacaaccaaactttgttaaacccactcctatcttcctagtcatttctccacccaattaactaccctagcctaaggcctctttgccttatcttagttcacaacttactattctttgtccaattcagtatataactgaccctaactacttctttgggtcttcatgttcttatgagggatcctgtgtcatgtaaaacatgtattaaagaaatttgtgtgtttttctccagttgatctgtctatgtcaatttaactctaaaagggaagaggtaaagttttgcctcccctacaactccaattaaaaggcagattgtcctcaaaggatcagtgcttgagggatggataccccattctccataatgtgctcatttaacattgcgtgcctgtatcaaaacatcttacatactccattgacacctactatgtacccacaaaaattaaaaagaaaaaagttggattgtcgggtaggttaatcatttttaaaactatatgctgtccaaaaatattatattttaagagatataccttaaataaagggctacaaaacagttggaaataaaaagaaaagatagctaccacacaaacaaaagaaagctaataaaactatattactgttggatttaccataaaagtccaacacagatggtactgaaaagagaatccagaaacagacctatacacatgacttgacttatgatcaaggtagaacataaagcagtaaggaaagggtaagataatcttttcaattaatctatactgttcaactggatgttcataagaaatataacaaaacctcactacttcataccatctcataccatatgcaaacaccatttccaggtggaatgaaaattgagaacaattaagtttctagaacataatatattagaacatcttcatgacctgcaataagcaataagcaagattataaaaagctctaaccataaaagacaactgataagttggacaaccttaaaatcagaaactcttgttcaatgagaacacatggatacagggaggggaacaacacacactggtgcctggtggggcagcaggagggagagcattaggaaaaatggctaatgcatgcttagtttaatacttacaggttgataggtgcagcaaaccaccatgacacacattttcctatgcaacaaacctgcacatcttgcacatgtagcccagaacttaaaataacctattgattttctcaatccatgagcataggatttaacaaaagaaagaactctgttggaaaacatcattgagagaacaaggcaggccacacagatgaaagtatttttctcttgtacattattcacatgtgtgaatattcacaactgttactaagttatctggttatcagttaatgtaaacatactcttggaaacatgaactgaataaaagggtcctattttggcacctcagcctatttaatgtcatagcctctgaccttccaccttcaaaagagtctataactctgaccagttgcctcacttgttaacgtattgccctggtaacaaggttataattgacatctttgattcctaaatgttttaaatagagggaagatttcctcatcaaacagaggattactgggactactactgctcccaaatgcatgtaggtactataatttattatcaatctgttagatttctttttttaagaaaaccagaagttcatgagtgttcatttagatgaagtgaagcagaacaatactgcctgctttaaaacctcactagtttgtcaaaacctcacagagaactgtggaaataatagctctgaatttatgtttgtctataggctcagaattcttcctaaccccacctcctagtattaaggaaacaaactttagaagtaacaaaagcagcttccattcaggaatctgctgggagacagtctccagccaaaacaaatatggattgaaggaggaaccttctcctgtaagacaggtttcataaatccaataaattccataagggatggaattgtgccaactgcctctgtaacaagaagaaaaatgtttgctcacagctatgtgtggactctcactgtattaatttcctagggttgccttaacaaagtgccacaaactggatggcttagaacagcagaaattatctcagtgtggaggcaagacgtctaaagtaaaggggtcagtaggatcatactccctctgaaagtgctggaagaaggatctttaagcttctggtagctgccgacattctttgacttgtggcagtataaatccactctctgcctcctttatcacatggtattcttccttttacttttcacattgtcttctatgcatatctgtatccaaatttcccctttttataaatatatattgggttagggcccaccctaataacttaaataataagttaataacttaacttggttaaatgcaaaagaccctatttccagaaaaggtcacattctgagatactgggaattagaatctcacatatctttttaggggaacacaattcaacccataacagtcactacataaagcccaaacttaatattggaatgccaaaaacatgggattcaaagaagaaataaaagttgaggttttgaatgtactgggtggggaaggaaaacatgtcatataagagctagtaaccagggcagcctgggttacccccttgcacataaggcagcaatgccattacagggtgacataattatagaaattttcctcaaatgtagtgccaaaattagcctcttgctgaaatattttctccatttcaattaaagtgaaacaagtcagattctggataactgacagagactggtctactggaaatatataccagaactttggcattggacaaacagtttctgagaacatataactggtacttcctttccatggaaaacagctgaagctacagctgatgaaagaactccaactccaccaaagaatctgactgcacttgaacgtaatgagatttgttgagaatgtgtctttgggacttaaaagttttggcctttagacttttaaattcagaagcacaaaaaaaggattctggacacttaaatctttcagtccttggtctttaacttgtaaagggttttaatcttgcaaccttaatgttccctgagatgttcaaaacagaaaatctttacattcaaatttgttggcattttactgctgaaacatctttatgtattgccaaatacctttgttcagtatagtacatcaaaggctctaccatatatctagagataatttggaatgggaagtaaaacagtgacatttctgcctcagatatagagtggcattaggtttcaattttctgttctaacccaaagtagaatcttcttccagggtcaacatctaaagttcttccacaatccaaagagaatacccaaaagaaggtaatggcctcatgaagaaaggaaaagaaccatccagataaatctcctccaaaaaacaggttaataattaagtgaacaaaaagctaggaaatgttagagagaaataccttttccctactcctagcttccgtgagaaagactgagtataccatcggcctctctctatttctttaatttacatcaccactgaggagctggaaatatttgattggtaaatttgggaaggaaaatgagccaggctcagctcaggctcacccttttgtttacatgaaaactgaaagaggagtttcatgttgttttcagttttgttccttctggaagctctgcccctgtgagaaagtcagtattttgttctgtcctttttttctggagtcaatacagtaagctttctcttccagggtggaaggtgaaaaatgcagggctggaaaggtctaactcaattaccttgcagtgccttgggcagtaagtttgctcaattctggagctcagtattagcaaattcactaggccaacaacctaaactcacacccatgaacctagccaatataggactaatgaaggttacgtttcttttcctactctgtcagaacccaggaagaaagaggaatgctgtttatcagaggacctttgagagattccagcgaggctcaacataaatatctacagtgttcctttttatattagcaataatcagacaattgcattttttaatataaataactaaaatgaataaatctaacaaaaagatcttaacaagagatatgaatacatggagttgttcctattcattaatggaaggacttaacattataaaaccatcaatgcttcactaaaataaacatctgaatttctaaactccaaagcaattccagtaaaaatcacaaaataataatttgagagatttggctaattcttttaaaacatgtatggaggaataatgctgctctaatactaaaataacttttaaaatattagagaagaaaaatcaccttatttgatattaaaacatattacaaagtcacaagaaataactataaacagtgaagtattaagaatggaaaacaaatggatcaataaaacaaaacagaattcaaacacataagcatatattggaagttcatatttgagtcagatggtttcgcaaatcgggaaaggtaaactggtcaataaatggtctgggaaaagtgacttggcatgtggaaaaaataacattagaaatctattttgccataaaaaaataaggtctagataaattaactacatgaatgtaaaaagtaaatgtttataaactattagcagaaaattcaggaggctatcactaagatgttccaagaggaaagaatttaaaacaaatgcacaaaacataaaaagtaatagattttaactttttgtgcatcactgtttgtaaaagagaggcagcatactaggaagacatttgcaatggaataagagactaaggattaacataaaaagtattattatgaagaacttaacaaatcaaggaggaaaaaaaagcaataacccaacagcaaaaatggaaaagaagaagaggtcattcagaaagtaaaactcaactggctaataaagaaatgaaaatgctacctccatggtaatcagaatgctagtaaaacaataaccagtcccctctccaccatccaccatattggcaaaaactaaagagactgatactacgaagtcacagtgggaataaaggaaattggaaatcatgtatgtactcctggtgggaagcaaataactgcactttgaaaaagagtttgatagcattgggtaaaaatgtaaacttgaataccatatgacacagtagttccacttctaattttacactttagagaaactcagaagcacaaagggaatataaaaatatttactgaagcatttcttctaatatcaagaaactgaaaactgcctctgtcagtgtgttgggtgaggaggtaaacatgaaatgtggtgagtgatgcaactgaattcagtagctgaatataatgaagaagatctgtatctcagaatatggtgcatctcaaacacaatataaagcataaaaaatgcagaatgagataatagaaattctttatgtaaaatctaaagtatacttaataaaggcttatatgcactgttattgatatgtgtatatctgtgtaacaccagaggatactttattaaagaaggatacaaatactgggcatatgaacattggatgatttgcacaggtaaagaaaataaccctagggatagggaataaaatggaccaaaagacaaaaaaaaaaagagaattttaattatttatttagaggagtgtagtaaagcatggtgtctagactgagaatacaattgattaaattaacttaattctgtttcctaaggttcaacatacactcatatataccctttcaatcaccacaaccattaggacagagcaaaaggggcccctgctatgcgctctatatagtgtaatctctttctcactatctcttattactgagcacacaggcatctctattagctcaaaatccaggactcagccctacccccagaaagtctataaccatgaacacattattcattctcataactctatctttcaggcccctgaacttcctttgcctatgcctatgaaagaagaggactgcaattaattacactattctgcttactttacgtatgtccgaattttccataataataaaaaaaaaatgcttaaagaagtcggggagtgtgaagccacaattgaatacagagaaggtttcagattgtgctaatgctaacattttagtctctgcttcagaacaaagatagcatgtgagcaagtgcttaggtaagagaaaagagatattgtcaaatccttcccctgcaaagcaagaacacagatgattcttgcatgacaagatactacttcttaacagtgccaaatgcccatcttcttccttctctttttactccaatttgtgactctagaaatactagcaaattagtgcacagtatttgcaacagtagcacatggtggctgaggaacattctgtagtagtaagcaatctatattaatatatatgtagatctagacatgaactacgtgaacatgatatggactctttagacagtaagcaaacactaaaatagtgaataaatgtattgttataatatttaataatatgcaattattcaaaaataagcaattccggtgttattaaaattttttaaggaaacaattacaattctacaataattttaatatttaagaattttttaaagaaaaatactttttacacctattttatgtttgtgatataaacccaaatttgatacattttgagtataacacattttgagtaattacagttttaacccttagatcatggctgtcaatagtaaataagtaaaagtcttcattataacatgatttttaaaataaaaatgaactatatatagtaacttatgaattatgtaagtattttatcacttattcaaagattaccagtccatcatcagatatccataataaatgcattcagttatctttggtacttttcaggattcagtcataaaaataatagccttggctggtggcttatgtctgtaatgctggtggctagcactgtgggaggcccaggcaagaggactgcttgagcccaggagctccagaccagcatgggcaacatggtgagatcctatttctacaaaaataaaagttagcctggcctggtggatcgcagctgtggtctagctaatcaggaggctgaagtgaggtccaggtttcagtgagccatgttcacgctactgcactcccacctcggcggcagagcaagaccctgtctcaataataatcatcatagccatacatgtagttttctgttttgatgcagtgaaggtgtatttgtgaaatttgagactattttattttacaatgtgaaaacttgatttaaaactttaaatacttaaaatatgttgtgggggctccatttatactcttaccctagggccagcaactgttgaggcaggcttgcccattagctatgctttatctgttttcagaactaaagcaatttgaaacagtgtattttacaaaatgccctgagacattaattacagcacagaaaaaagtacagccaaagaggcacataaagctaacaagatggttttagtttctaatctacttttgcacgaagtcagttggggaaaaacaaaccaaggaaagcaaactgaataatcaggttacacacacacacacacgcatgcctcaaagctgaatgcatacaggccacaatagagtcaaaagcacagcactatccacaacatcaaacaagttaacatttgcaagtgaaagagaaggctaactctaaaaagaaacaaaagttatacacttattttttccagcctcataaggaaacaatttaaaagatctttaggaactactactatgtaacagaacgacttcggaaaccgagaacagaataataatgtttcaagagaagcgtggatttacctgacaagtaagcaggctctgggctccagtctactgaactgggggactggttagcgagcaacacagagaactagtaagatgatgattgtgtatctgcaggcagataaaagcgttacggataaaaacaacaacaaagaaaacaatttggcagatgggggaggcaaagattttcccccaaaggaaaaactgctgaatgaatgcaagcagcagtagataattcaaagtcccctctgccctggtaactaacatagctaaggtgtccaaaaagacattaaaggtgaatgaaggggagggaaggcgtcctcctcctcccatcattactaaaaaatgtaggccgggcgaggtggctcacacctgtaatcccagcactttgggaagccgaggcaggtggatcacctgaggtcaggagttcgagaccagccgggccaacatggagaaaacccgtctctactaaaaatacaaaattagctgggcgtggtggcgcgccaagtagtcccagttactccggaggctgaagcaggagaatcgctggaacccggaagatggaggttgcagtgacgcgagatcgcaccactaaactccagcctgggtgacagagcgagactccgtctcgggaaaaaaaacaacaaaaaaaaaccacgctgccgtattcgcagatgctcggccagcctggagcccggtccagaaaaggccgcacgtggagccacgtgtcgcgcattgagccgccgcgggacgcatcaggcccagctgcgcggaggggctggcggcctcaaccgcaaggagaggccgcaggtggggacggcgggagggagagaagggactgaaggcgccgagcaggaggaaggttttgcgcgcactcccttcttccctaagtggaaccggcagtggcaacaacgaggccgaaggcgaagtccctgctcccaccgccggcacggtgacccttttcccagggtcacccccgaaccaacaaagcacacacacacccgagatgcgccccaggccgcagcgccaaccccccttcagatgtcccggagacaggcgagcagcggtccccagggctcccgtcgccaccgcttctcccgcacccctcagcctcctcgggccggcgacgcgcgcagccccaggcctgctccccgctcgccaagcgcaccgccccgcgcctcagccaccttgaccgagtcgcccacgcgcgggggcggctccgagcgcccatttcccatccccgaggccgaggctggccaggcaggtgctgatggggagcctcgcgcctgcgcgagccaccctcgccgcgaactctgcacagcccacgccctggcccagcctcggcgcctcccctccgcccactgccgcagaaccgcaccccctccccctcggcagcttccacaacggctccgcctcaaccgtcggaagcttctcgcctgccggcttgaaaggccaagccgaagccccaccctccctccgcgccccgccgtgggggaagcccacccaggcactctgctcaacctgcctgcggcaggaggcgtccgcgtagtgtcggtggagccgccccctatgccgccgagcgtcgcaactctgcgcctcagggaccgccgcagcgcctccggcgaacggcggaaggcgggaagcgcccgtccaatccgcgccaggtgcggtcgatagtgcgtccaatcggcgtcgccgccagccaggtcccgccccccccatcccccccacccccgccaacgctcgccggggtcgcccgaggcctgagccaagggggacgctgtgggcgcggctcaggccaggccctcaggttagtgggtccccgctgtccccgcgcttcggcccgtcctctcgcgctatgctctcctgatgaacgccccgcgagcggagtcacccccgccagcgaggagactcgctgccttgactggggccctggtcccgggacaggcgagcaggaagggatggaagggacggaagcgcgggcgggaccaggagaagcccatccccgcgctatgcgtccccagagccactgggacccgcggctccagccagccctgcaggggcgagctggaccgggggaccagggcgccgggccgacgactcctgggtgaggcctggctcctgccggcagggggcgcagggccgcctgggctcctgggtgcgggtgccggagggcgggagagaccgcaggtccggagacggggtgctgagctgggtacccaactgtgtattcctaggctctttcagacgcttccatttaagagatccgtttaacttatgcagccagcgggtgcttgtgtaaaaaatcgcaggcccttctgagacaggcacagccgcgaaagggtctccttgccccttggctcgcagagggcgtcggtgttcggcgctcagtcttctgcgtgttttccccgtgctcgcgttctgagatggaaactgttccacgtgcactgagatgcagctcggtctttctaacagcttcgtaattatttaatcatgtggattaacttcatccgaggaattcaatcctccactgatgagcctacacttctattacaaataatactgcagcaaaccacctttggattaatatttgtgtcggatcaatttttaaaagttgaattgtatgtgtagttaaacttttataggtatcttcaaatcaaaatttaaaattatattttaataacattttaatttcttatctaaaaggcactaattgtttaaaaatatgggattaagatttaaatgtgcggtggaaagcacctgaaaaaaataaacacaaggtaatagaatcaaagctcagttgtggaccagagcagatcaaatcacagtaaataagctctcagaggtgttttaaatattctgcttagctagaattaccaacttcttgacaactttgtaactacccccattgaacttaattttgatatcttagttttttaattcagagctgacagattacatatgcaatctaaggtacacaggtgtacgcagggatttgaggggattttatatgttcaaagctttcaatgcttttgaattatacgtttaagtactaataatgtataacacaaaatgtaagaagatcgaagagtgcttcaaaattgtgacctggcaattttgcataattattttcatacctagttttccgccaatagatctaagatccttcatggtggagttgcgaacgcacagaaattttcctaatacacttcaaaaattaatagtgatgattttttaccttgccgctttttagttgaagaaaaatgttagtcttttttattgcttcatgtgttcaggaagcctgcggattatttagtaaacatccgtaaactacaacatggaagaaaaaaaggatatcattaattttactgttaattttttttaaaggttttagaccgtggcatttcatgaaaaaccttctcaattataatcaaaatttggaaactatgtgccgtggttcacacatatactccctgcactttgggaggctgagttgatgggattgcttgaggccaggaatttgaaactagcctgggcaacatagctaggccctatctctacaaaaaaacaaaattagccaggcgtggtggcatgtgcctgtgcacctagctgctctacgccggaggctgaggtaggagaattctgcttgagcccaggagctggaggctgcagtgagctatgattgcaccactgcactccaacgttggtgacaaggcaagaccttctctcaaaaaagagaaatatcataatgtggcgttcaattaatttagctttctgaatcaacaagcatttatttgcaatattctatatgtcatataacaggtagagagagcattgactttgaaacaggtttcaatgttcaatttgttacttaccagctatgggactttaggtgaattacagttatgtattgcttaatgataggggtaagttctgagaaaggtgtcctcctcaagcaattttgttattgtgtgaatatcttagcgtttacttacaaaaacctagatggtatagcctactacacacctcaggtatatatagtacagtctattgcttcaaggctgcaaacctgtatacagcatgttactgcagtgaatacggtagacaactgtaacacaagggtatttgtgtatctaaacacagaaaagatacggaaaaaaatctggtataattccatggatccacgtcatatatacagttaccctgttgagtgaaatgttatgtggcctatggctgtacttacaccactctgagctttattttcagctaagaaaaaggggatattgtctaccaggtagcataacattcagaattaaatgaaatcacatatttaaagcacttagcactgtggccaagcaaataagggaagacaaaataaatgtaagttttcttcccccatgtgcaagactttgtacttaggtgagggtcacgatccggaaggcagacagacagacactcattactgcctgcacagtgtcattaactgttgtaagagaagtacattaatgatcacattccctgtattcccctagagctttcttcatacctcatgctgacctggcatataaaattgcatttccttttctcaaagacacatacaacaactctgctactgacgctgaggcacaatgacaaaatttatttttgccaaggctctacgtttatcagtgttgtagaaaggataagacttgcatgtgaaatgatttagacaagaagtttctaaagcttggtcttctgtaattaggccacaagaaaaacatactgaagcataatagaatggctcacaactgtttttgcacatatactttaatacttaggcttgggtaaaatcattttaaataacatattaaaatatgtttggggggacaacccagcaattgcacagcccactagaaaattttaacatctaagtaatataactgttttagggtctgaaagttctccttcagttgttccacagcctctttatcaactaggcaaatatatttaagcttttaaatttcataatgttggtattttttaaaaggcacgggaggttcacttaatattaaatatataacattcactttcataaccaaaacctttttggcaagtgactttcacatagattatgagattctctacatgccttaaaataaatctggcagctcttaactcatatctaaattctctggacaactgtcttgctctctgttttggggccaggggcgtagcagtgaaggccctaacaggcttgctgacctaattggacagtttgttaaatagcaggaaatgtaacaaggcttctctctctcttgcatgttaatgtagtgaacagtgctaatagccagagattgtgcaatttagtcacaatatttcaagccaaaattcagtgttcttatattaaaagataccgaagaaagctatccttgttctttgaattataaaagcacagaggttgcaatgatcagaaccaaactggttaaaagccgaaatgcatcctttcagtattgatttgacagatgccaacaagcattcaaaaatttagagttaatttcttggtgacaggtagcataaaattgatcagactggtttcagctgtatcataagcttcacaaattggagatcttgtccttcctggctgtttttttttttttcccacaccttaattctagcacctgttgtcagaccactgttcagcaccaaaagaactcctcagcctggagttctttggagttttaagtgattgcctaactcagcaggggacagtggtcttgacttcttggttgacggtttaaaaacataaaagaattttatattttaaaactgacaaactagaaaatgttagaaactctatctgaaggcagaaagtataaagttggtgggtacctgataaaacatgatgtatgtaaatacagttcaaaacaatttaaaagtataaatatttgtcaattatttttcctccagtgctctggctattgctgaaaacaccttctagttccaccttgtaactggactcccaaaagatgaatgctgacatcttctgatgcttaacaagaaataaaaatagtcaccttaatcatcaaaaaggtaattgcaaagggcactgttgcctgaaattctctagtcacctgaaaactgaaataactgaggcaagacttcttaaaatgcttagtttcaaacttaaacagaatggcctgataatgatcaaacatgtacagagaaatacatgaaatcagaattgtgaatgcagagaaataactgttttgctagtttaaaagtctgaagcttttccctcctccccagctgttaatgtaggagacacacagcctaaccaggacagtctcaatgcccaggaatggttgtgtgatgactgataaagcagaaatttcttgcctattaatagtttcccactgttagaaggctacagccgttggcaatcagatgtgggctcaggttttccttatcctggggcaggaatgcctggagggaccacgatgtgggtcacactgtacattctgtttactgtgggcacaaacacagaactttttttttttagcttattaaatcgagaatattcctgaggaggcatccgctatgggctaaaggtcccaacatcacaataataaataacagctatgtttacagagacacattcaggacacatgcaaaagcttttcctagcaggaggacttgggcctttgcaaaacaagctgcttgggcctccccagagggcccaccctcccatgcacctaccccaccaccctgccccaactcattacacaactcggccttctggccacctgaggctactttttagaccaagtgactcagacgtttcaagtagaagacaggatgggccactgccaggggaccttgcagcagaaaattaggtcagaggacttggagggtggtgaagaacaaccagatagatgtgagagcccagcagggaaatgacaggaggcgcagcttaggtgtggaggctccaggtggccggtccccgcgcggctcagatgaagtggatccagctctcttcgcactccccgcgaggcatgtgcagcgcgtggttgcgacatgtgaggctgtagtctcggtggtcgttgttgtcccagtactcggcacccgccacttggtagcgcaccgcgaagtgcacgcgggagccgagctccagcaggaagggcggtactggaaagccgaaggtgaaaacgtcctccgtgccctcggggcctgcgggcccgcgccaccgcgccaccgcctcgtgggtactgcgccagcccgagaaagtgtagcgcacagccacctgcttctcgaaggccacgttgcacacgcgcaccgtaccgctgatgccaaggtccgagcaagtgacacgctccaggcacacgagctgccgctgcaggcgctcgccaaagtcggcggcctcgacgggcggcgggaaatcgggcaccaggcaatgcagggtgaactccaggtcctggctgctgcagcacaggtccgagttgattgcgagccgcgacagcacgtgcagcggcacggacgggtcgtctcccgcgttgaacaccttgacctgtgccagctccaagcccagggcgtcggcgaagcgcacgcggagcttctggctgcagcccggccgacacgcagcgcccggcgcgcccgcggccttctggcggcgctcgggggagctgggcagtgagcgcgcccgccgcaggatgatgggccgcaggcgggggtcgcagcccgacggcgctggcgttggcggcggcgcgcggcccgggctcccagggggcctacaggcccgcggctccagggccacgccgccgtccaggtccgacaggcagctgaggctccgggggccgagcttccgggatcccagggcgctaggcaggaccgcggagctcgggcctctggacatggccccgccggccgtcggaagatgaggcagggatgagagacgacctcccgaccccgcgacagctccctccgtgctcagaagccgcagagagtccaccgtatctgcaacctgcgggggacctctcgggcccggtgcgccctacccttggttcgccaccttgctcctcgagtccttgtccaggtcctccgcttcttgcggttaaagaaattgtaagagtggggagtttttctctagtggaagctttcagaggcctcccgggagcgcagggtagcgcctcttttttcttcttgcttccttggaggttcttacaagaaggctgcgttccgggagcggcccctcccactttcccggtccgcggcgttacttacaaggctgcaacttgaccgggtgcaacttcctagcgagcctccgccccgcccctcgtgacgccgcctgcaggcgggcccccgccggcctcagctcagccagggagctcagcggagctgcgcgcctccgcctccagctcccctgccgcagcgcgccgcagccgggcgtccccgcgcgggcgccggagaggaaggaaggctggcagcctcgtcacgtgtccgctgcagtcgcgaaacaggtctgatcaatttctgtttacgtctgcctggattgcgcgcctatcgatcatagactttgtctgcacaaacggaggacaaggaaaatgcatgctgcgtgtccttagatttctgggttgtggatggggggagcggtggtgcaaaaaccggccttgccaggagctggtctcaggctaattttaaacatcgaggccagcccacactttggacaggttcactgcaacctggacccttggtcagaccgagggagcctcactgcgtagaggagcagcgtcatgtccacatcacccagaatgctttgccgcaccgaatggccagcagattcccttgagggtggggaggggaggtgctgctgttgtcttcctggactccgcgccagagaggaagacaggggaacaagagttattacccgctgatgacttctgcagctgcccttaatcagcctctggcgcttggggagcatatttgtagccagaatctccgacttttagctttgtttccaagcaagccagaaacaccagcaaggcctggagcttgttttctgcctatttagaaccctgcaggcattcgtgtctctcacccggtagctttgagcacaaaaccccacagcctttggtgtaaagcataccaggtgaaatgaagtagaaaagatgcaagtgcactttccagagagcagtttggggccagccattccattaagaaggttcctttttattgtccagagggacaaagcagaaagaaaaccagactaatgaaagggggttgattcaagaacattcgttgcatctaaaatgagtcaaggctgttgattgtggtataattcatgaaatgtgagagaatgattttatttatcattggatgtaagctaactaaaaaggcttacatgattaatgtgggaaaaatacaggaaagtttcaggaagaaaataaaaatcttctataatcatctcttttattttacagagacaggtgatacgggaaagagaagtatccaatttccattcagtgcacttttaataggccactcaaaatgagaggggaataacagcaatatgtggtataggtcaacaatgcttcataaagagatgatatataatatgtaatatgtatgaatatatggaaagtcttataatggattgatgtgatagagaaggccgaaaaattgaatgggaacgttcctcctagagtttaagctccttctgaacagggacgtgcataatcattgccatttttctgggtactcctgtaattatttgttgcatgaatgaatgattgggcaatgcaatgattgaacgctgtaataagacctgaccttatttagccttccagatttcttcaacatattatttccaaggaagattatacctgtgtgtgaacagggagagagagagagagatggaatccattcacagtatttatagtagtgtgatcctgtgatcctgtctctaatatctactgtaataagcagaaaagacaaagctgtaagcataagacaatgtctcccttccccagtatttcataacctagagtgcaaaccactatatgatcacagccttaatatttcaatattatacaagtattaaaaaacaagtgaaaaaccaacccgatactggtggtaggaccatttgcaatcaatagttactgacagtattctgttgcttctagttccggtggtgaggagacctttccaaatataagaggaataaagaagtcacctccccagctgtcatcatcttccagcagattgagcaagaatattttgagcactacaggaaaggtaatgtaaacttagaagaaaaatctgacttagatttattctgggatttttgtttgtttgcttgcttgtttcttgtgtacatgttcacagtgtttattactgcatccctgtttttagacagtccatcaaacccgagatgatgatcagccacgtgattttttcaagaagaggaatagggtgaatgaatctcatcagaaaagcaggtaaatagttttagtataattgctttatcttgcaaaagactcattatctctgttgtccagattgaatatgtggagtggggaaaaaagtatgtctatagataagaaatatacatttataatttttttctagcagaaatgaatagaaaagtggtttaagcataatagtggataaggattccaacggtcataattctggcagttgttagcagaattataattttgagtaagtcctttaatcacttttctatgttagtttccttttatataaaaggatagtgacaataattaatttttatggatgcatactgacaggcaggaacaaaatgttttaacagtgttatgaattctgaataatggagattccttcatttcttcatttattcaacatttattgagcacacgttgtactattggcaatgatttaatgtcctgcatatttattaattaaaatgtagcacgtattcaaatagttgcttaggttgtttgaaaccactgggcaaatgaacctctgaagtttccagaaagcatgtttaccacccatttctattcattctatctgacttatattacagagaagtattattaatcttaaatgccacgttcttggtaaataaattgaaaagaggatattttcaactctgatgtgagattcagcatcagaataaattatgccagagagaattagtttctatactcataatgcacacagtattcattattccctttacctgctattcacaaggtaacactaagaccctgtgttttcattcatatgtgttacagggcaccatatgattttatttctgttctttaaacacaattttcccaaatgtgttttctgtttgaaaacattgtaacaagcttttgatttaaggtacaggtttgtatgtgcaatacttttatatattaaaatttcactcagctcagaatcgccaccaatcagtgattaaactgcaaaacttgcatgtttatttgatatttacacttaatttaaaataggtgtataaaataaaactgtttttacttctgaatgttattaaatgcttttgatggtaacaattccagagttctacgactgattttttccaaactaatgttttttttttaaagtacacacgaaagtatgaaacaagcactttgagaaatgttaatgtttttcctaaatgctaatatttgatataaaatggaaactgtgcattctcttttgtcacatgcattatataatgtatctcaaatagagtattatatgggaaaatgttctgtaaaattacttatgctttaaggagtttggaagctgacattttctaatgcctactaatagctgagacaaaaaaaagtacaactagaagattctttttgtttgtttaattatagccagaccattttttgtcatatgtggtaagaattgcagttttattttctcacagcaatatgaatgctggcccatcttggaataaagtgcaacattcaaagaattcttcaggaaaaaggcagagtaaatcccaagtaccccacgcttcttcccagccgagaagcagcctcacagctgtcacccagcctactgaagaaaaacttaaagaaagcatttccccggaagcaagacgcaaaaggaatccactcggttccaggtgtcagggggcctcagggaataaactgtttcttgattttcagtcaatgaaaattattaaagagaatgctgatgaggacagtgcaagtgatctctctgattcggaaagaattcccattcctccttctcccctcacacctccagatctcaatcttcgagctgaagaaattgatccagtttactttgatcttcaccctggtcagggccatacaaaacctgaatactattatcctaatttccttccatcccctttcagctcctgggacctacgagatatggccctgcttctgaacgcagagaacaaaacggaagccgtgccccgagtgggaggacttcttgggaagtatatcgatagacttattcagcttgagtggctgcaagtccagactgtacagtgtgaaaaagcaaaggggggcaaagcaaggccccccactgcccctgggacctcaggggcactgaaaagccctgggagaagtaagctaattgctagtgctctgtccaagccactacctcaccaggaaggggcttcaaagtcaggcccttcccgaaagaaagcttttcaccatgaagaaatccacccatcacattatgcatttgagacttcccctagacccattgatgtgcttggtggtaccaggttttgttctcagaggcaaacccttgaaatgaggacagaagaaaagaaaaagaaatcaagtaagagtacgaagctgcagcgctgggatctgtccggcagtggaagcagctctaaggtggaaaccagcggtcacattcgagttcccaaacaggcagctgtgattctggactcagcagattcctgtaaggcctccaaaacacaagcacatgcacatcctaggaaaaagggaaaggcagagagctgtggtcatgccactgtatcgagtgagaaaaaactgaaaacaaacggagtaaagcaaaacacatataaactaaaataaatatctaaaatgctgaattgccaagacctgcaggtacctcaatgttagagcgcttccaaaagtcaaaatactgtgaattttaaggaattttacaaatactgacatttaagtagttgactggcatttttgtccacctttatttctaccctgagtggggttattttcaaagggaagtgtctttcaataagcctttctttgtattgtcagtcttaggcaaatgagagccctttagataaaaattatgtaaaatatgtgccatataaaggaataaaatggcacctctccagggaaagtgtcagtgaaacctcagctacagtagccggtctgtgtagagcagctagtggtgttacctccccattttcacatgcacgtaagtatatgaaatagtgcagactgtttcaaatggtgtggaatcctaaatgtttaaaataaggtccttcttgcccactccctcgcttacttttttataaactcctcaagcaaaatttctgttcattttacccttaggagaagctttagttcttcctcaagtcagggagtagtgagtttgtattttgagtagtcatttctcactaagctggttgctttctagagagacagtggaatctagtactttaatacattttctctgacatggttttttttttcttttttgaggggcattttaaacttagaggtggtggtaaaacctacttttgagttctccgaactgaggttaaaataacttgcagaattttccaaagtcaatgggcttagcatgattactgctgtttggtggggctgagaatgaaatatttgacattctggaattgctggcatgtaaagcttctccagagaggcaccccagggaaatcactctttacaatttgtaaaggaagggcctgtaaaaggatcaaaacacatggacctacattcagtgtaatagttacaaagttactgatttgggttccacaccctgtggtccttagtcaaaaataatgatctgtttcagtttgcaagagcaggattttattattttgcttggggtgaggggcgggagagtggaatatgagtaaggttgctgaatgaattctaaactcgcttatctggtcttcaggcttcccaactctctccaagccttcttatttcactgcagttaaataacatcttcttgttcctatagttgtgctgtgagttttctgttcatatttgcgcagtgtattttaatacggcccatgtcattatagttgattttatccctttaaacaattactgtatttgtttttgacgtagaggtttcaattttttcaccttgggggcaaatgaaaaacttggcatttttcatttgggaacatataatagcttgtaaacttttcagacagcagtaaatgtctgaaaaaatatcaaaaacagcataaagacaagattatgtagctctaattatacgtatataattataaaaaacaatgtgcaagggttatattttaaggtcttttaaaatctgattttgatcataccaaatgacataatattttttatggtagccttttactttcaagacttaattttcagacttgtacaagttccttcttacattctttccctctcacaccatcctactggagaaagcatacttttatgctaagatcttactttaagctttttatgtgaacaaaagatgtacatatagtaagtattacttccgtagtcctcaaatttactataacttttgtacttagtatatgttttatatttggaaaacagcactacgcttagttttcctgtagttcctgagtgatgtctgtgtgttccttgcctgcccttttttgtgagcacagattagtctgttatccatggctggcacttcacttatgatcctttctctgctagatttttatgcagctctctatgaagtttcatggcccatagatattcaaaagcaagatattctatacatatgtgtatatgtatatatactccttatgttaatactaaagtgtttatgctgagttgctgcctttccccgtcatgtatccatgtgcatgctcttagagaccttgaatggttgagggtaaagtgatttattagtaattctacttgccttgtgtatgtctgagctgaaaacaatcgtgattaagaaatttagaggtggctgggcgtggtggctcacgcctgtaatcccagcactttgggaggccgaggcaggcggatcacctgaggtcgggagttcaagaccagcctgaccaacatggagaaaccctgtctccactaaaaatacaaaattagccgggtgtggtggtgcatgcctgtaatcccagctactcggaagtttgagacgagaatctcttgaacccgggaggcggaggttgtggtgagccaagatcgtgccattgcactccagcctgggcaacaagagggaaactccgtttcaaaaaaaaaagaaaaagaaagaaattgagaagtaacgcctcataatatttgttcccagctttttaaattgaagctggttgcataatctggggaatagtcataatttcatgtgttatacagtttaaaaagcctgcaaaagtgactttgcttgtttactttctgcctcagattgactattttaaccaatattgtcacgactagatcatagctcctagtgaataacatgaggtgttttaaagttaggtctattacagaattaacataagcacaattttaattttatgatatctgatatgcctatctaatacatcttaatgcattaaatgctgcagataagaatcttgctatttttcaagtagacaacattagaaagttgaatcatgaactcattcaattcatcaagtcaaaagcactgagtgttttgctagtctagtgacatgggttattgtatttccgagaagtgcctctcatttctggggagttgtttacatataccctgcatttaaaccaattaaaacaatccaagtttctttaaaaaaaaaaagaaaaagaaaaagaaaaagaaaaatattttaggcttagaattatctaatggaaaaaatgtaaaaaagtacaaaaatgaactaaaagtatatcagtatttgcagtatttgctgtgattacttaggtttagactttctcaacttcttagatgactaaatgggctgaagacttgtaactaacttgaataggatagacttcataccctgtgacaaaaaggatggggaagagaatatcattggtcttgccatatacctcctagctaaaaggaaaatggtttgtagttgttcttgggcctactgtgttgcttttcagaaggacataagactttctactttatctgatatggatatcgtctacttcctcattcctttatgctcacttatggagtagttacatagaaatataactcttggtggtactgtattttaaggtaattcagaagcagtatgtattatttatgtacatgtacaggacaccattcaaaatggcttgaaaatattcagcatgtttgttatttgctgttatattgtatgtttagttttgtatgtgataaacagaattgatgtaagtttttgtggacttgaatttctccttccttgagatcaattaaacagcagaaaaatattgtctggatttttctggtattgttttgttttgcttttcatgcagttctcttctgaagcttgcctttattttctccctggttatttaaaggaattgcccaggatgaaatgctgttacaactcctgtcttaacactaagcgacatgggtggccaaagcacaggttaacattaccggatatatcagagaagcattgcagtacatttcttgagtcgctcttccacttactactccatgttgaggattaattagggtagcaggatgcaaattcagtaagcataaattaaggtaacctgtgatgtaatgaacttgcacctttatgtacatatccggaaacgagtaccatctctttcaaggaagtggcctggttaggagatagcagttttgagcagctccagctgcaaacattctcaaaagccctttgctcttctttctaacttcactctgacaatagggtgcattcttttgagtctaccaaattgtggcagtaatgttcagtggcttaaaaagtaagtttttggatatgttttgaaaattaaccacgctggaggtttaaaatcttttttttttttttttttgtacaggaaatgtattattttgggctgttgctgttttattatccacaaggtggcgaccaaaccctttcagatagcagtgaatttggcctgtgagtaccttctagtcaaataaaaaggtttttactggaatcaaaaagaaatggagagaaaaagactttttgacttcaggcccaaagcatgttctttatttaacttcactctgccatcagagaatacagtggtttatcatatgcagttaggtgctgtggaggattctctttgattcattgaacagtctcacatcataaaacactgtatccagcatagaatcgtcctcaatgaagtaacataaatcatcaatttataaaaatcttcacagagatccctgtttcataaaatgcaatttgaatatttttgtcttcagcaatttaatgtataaggaattactgtaataatactggaaaatatatatggaattaaaaatggaatagtcataaataattgccctagcttaaatgagattttagagcaaacaaataacacatatttaactttagattacattaagcgaggacaatttcatgtgagctcctccctagacctactgagtcaaagtctgcattttaacaaaatccttggcacattaaagtttgagaaatctgctttcctggtacttaagtctgcaagtttgagtgactacctttatggtgggtgagtagctggtaggccctctccccctcaagcaagccatttgcttatctagccctattttctccgtagtttaaaggcactgggctggctgcttacctaacaggttgcctaaatgaatgattcacggcctctgataaaatctgctccacaagtgaatgctaaggagttgaagtttatttatttatttttttcaatagcttttagggtacaagcggttttttgttacatggataaattatatagagatgaattctgagatgttagtgcacctgtcacccgagtagtgtacattgtacgtcatgtgcagttttttatcgccagcctccctcccaactttcccctactgagtctctaaagtccatatgtcactctgtatgcccttgcatattcatagcttagctcccacttctaagtgaaaacataaagatttgggtttaccactcctatgttacttcagttagaataatgaggtcaggagttcgagacaagcctggccaacaaggcgaaaccctgtctctaccaaaagtgcaaaaattagccaggcatggtagcatgcgcctgtaatcccagctacccaggaggctgaggcaggagaatcctggaacccgggatgcagaggctgcagtgagctgagatcgtgccactgcactccagcctgggtgacagagcaagactctgtctcaaataataataataataataataatgacctccagctccatccaaggttttgcaaaagacattgtttagctccctttaatggctgagtagtattccacagtatactatatatatgtgcgtgtgtgagtgtgtgtacatatatatcacattttctttatccactcagttgatgggcacttaggttggttccacatctttacaattgcgaattgtgctgctataaatatacgtgtgcaagtgtctttttcatataatgacttctttttcctttgggtatgtgttagtctgttctcatgctgctataaagaaatacccaagcctgggtaatttataaagaaaagaggtttaactgactcacagttccacatgactgaggaggcctcaggaaccttacaatcatggcggagggcaccgcttcacagggcggcaggagggagaatgagagctgagtgaagggggaagccccttataaaaccatcagatctcaggagaactcactcactatcaggagaacagcatgcgaaccacccccatgatctaatcacctcccaagaggtccctcccatgacatgtggggattatggggactataattcaagatgagatttggctgggggcacagccaaactgtaccagggcagatacccaatagtgggattgctggatcaaatggtagatctacttttagctccttaaggaatctccatatgttttccatagaggttgtactgatttacattcccatccgcagtgtacaagcattcttttttccccacatccatgtcaatatctattgtttcttgagtttttaataatggtcagttttacagaattaaggtggtatctcactgtggttttagtttgcatttccctgatgattggtgatgttcagcacttttttcacgtttttcttggccatttgtgtatcttcttttgagaactgtctactcatgtcctttgcctacttcttaatgagattacttagttttttcttgctgatttgtttgtgttacttgtagattctacatactattccttttgtcagatgtgtagtttgcaaatatttcctcccattctggggttgtctgtttactctgctgattatttcttttgctgtgcagaagctttttagttcaattaggttccatttatttatttttatttttgttgcatttgctttttgggtcttagtcatgaattctttgcctaagccagcgtctagaagaatttttccaatgttgtcttctagaatttttattgtttcaggaaactggcaagccacatgtaaaggaacgaaactggatccctatctgtcaccttatacaaaaaccaactcaggatggatcaaagacttaaaatataagcgttcgggcttcttagatcacctaaccacctcatctgattttccttacattcagactcctagattttcaaactccaggtgtggaacactcactcgacttcccttgtctctttcctttcactcacttggtcattttgtccaggattagaagagtgttcaccatctgtcagcaagcttttcctctaaacccatctcttgagatactctgcctaaataaagcaaggagaaagaaaaggaagtctttgcttttctcgcgtggtgttttcagttttctaaatgctggaatgaaatgctttttatttgtagaatttatataatattgaaatagcttaacaagtttaattgaagatgttctgattttttaaagtatatatgttcaccttaacagaacagtttttgatgcaggaagataaaaacagctgtttaaatcttcccctttactttcctttccttcattttctcctttcctaaagaagcataaacaatttatgtcaggggtgtccattcttttggcttccctgggccatactggaagaataattgtcttgggccacacataaagtacactaacactaacaatagctgttaagctaaaacaaaaaatgcaaaaaaaattataatgttttaagaaattttatgaatttatgttgggccgctttcaaagctgtcctgggccacaggttgaacaagcttgatttacaaacataaatgatagaagaaagagcatggcgattcataccactagtatgattagcattggaatatacttgcaaaaagtgaaaatgccttcaataagttatatctggcagcgtttttgtttgtttttctaattgcatatctgcaactacatattagttaaaaaaattggggcaagagattaaaatctctccaagataattttctggccagctcttagtggctgacaagataccaaaacctaagtttcagtatgcacgctcaaatcaacccatgtgattagtaatcagaattgaaaaaattcttagtccttgaaaaaaatccagaaacacaaatgatggattattttattctaatatgaaatctaatgaacttcagctcttaatatatgtgacaagatattggggtacaactagagatacactatcaggtattgggtaaaactacacttaataatgatgaatgcatcatgagggcatccccgcctggcttgggcttctgcttggacagtggtctggctggtcaggccccatgcccagctgaaaggaagagaaccgaggtggacagcaggactgagggaagatgacaaacacactggactctacctgcatttggcatttcccatatggatcaagtaaacaacagagaagtaaagtgctgatggagttttccttgatggagtcaaattcaccttctggttttttcccaatattgcattataaattttttcaggccaggcacggtggcttacacctgtaatcccagcactttgggaggccgagacaggtggatcacctcaggtcaggggtttgagaccagcctggccaacatggtgaaaccccatctctaccaaaaatacaaaaattaactgggcatgatggcacatgcctgtaatcccagctactcaggaggctgaggcaggagaatcgcttgaacccggaaggcaaaggttgcagtgagccgagattatgccattgcactccagcctaggtgacagagtgagattctgtctcaaaaaaaaaaaaaaaaaatcaaacatatacgaaagtggaaagagcttcacagtgaatacccgcatgcttactctcataaccagacagttgccacctggctgtgtctactctgtccatccgtctagccacctagcagtcccagctgtggcctattccaggcatcagtatccttccagcttctgcctgccatgctcaccctccagggcctccactgtgggtagctgttttatactatatatatatatatatatatatatatatatatatatatatatatatatatatatatatagagagagagagagagagagagagagagagagagagagagagagagagagagagagagaaagagacagagtttcactcttgttgcccaggatggagtgcgatggcttgatttcggctcactgcaacctccacctcagcgattctcctgcctcagcctcccaagtagctggccatgtgtcaccacacctggctaatttttttgtatttttagtagagacaggggttcaccatgttggccaggctggtctcaaactcctgacctcaggtgatccacctgcctcagcctcccaaagtgctgggattatagacatgagccactgcgcccagccctgttttatattatgttaatagctgctatgtctatggcagagttgaacctacttcaccactactggaagcagaactcttccctgattattttaaaaacccttctcaagagtgttctgagaaattaaacttttcttgtgactatgaagaaacgggaattgaattcagaagtattggctggaaaattatttttgtgttagtgaatatagaaaggtcttgactcaggggacatataagcatgagccattttattcttccttaatctgagccttcaaccaaaccatttcaatccctcagttacaactggggctcatcattacccagtcacgtcagtcagtaaaaccagcccagcttaaaacttcgatgtcagccttgatggaaatctaatctcttccatccaccctgggtgggctggactcccaggtgggtgtgtgggcaggggaggcttgggcagcccctcctcaccttccaacccagcactgagatcctaaggcatggtggtgctttgctgttgggacacctctgctccctccctcttccaggctctgcctcccctagcgttggtgacagaaagagagactaagggaaagcctaaggcctgtcctctgtaacaggccactctcccagcctttcactgcggctggctcacctctgcagaggaggcatcgaatgccagccttctcacctccccagccaggaaagaaggcttgagcctagcgctttacttctctggtgtttacttgatccatatggaaaatgccaaaggtaggcagagtcaggtgcatttgtcatcttccctcagtcccactgtccacctaagttcccctcctttcagctgggcatgaggcctggccagccagaccactgtccacgcagaaatccaagccgggtggggatgcctcatgatgcaatcatcattactaaaaaaagaacagtgagaactggaggtggctgggggcactcctcaaaaacatgagaaggttgaccctgggtaggtaattgtagctcatacctcccttgcaatcaagtaacttttatctcatgagcaatctcatttcttcacttgtcagcttacagggagctgggagctgccaccatgtggctataaagtattactgtacttccaaggacacagaaaggagcgctagactattgtcactatgatcacatgctcagaatagaaagggagtggggacatcttcaagctcaggctcacccaagatgtgcagcaggtgatgcccagaatcaccagctgagttccaggccccgtggcctacccaagtagggttgccgtgtggggaactggcattctgcttagttattttaaacgcttgagaatgttgaaaacttgtttgtttctaatatattaaaataccagttcctatggtgttttttgttttgttttgttttgagatggagtttcactcttgttgcctaaggctggagtgcaatgatgtgatctcagctcactgcaacctccgcctcccgggttcaagggattcccctgcctcagcctccggagtagttgggattacaggtgtgtgccaccatgcccggctaattttaaaataccaatttcttttaaacttaaaacgaatgtgaaagtggaatccttcactgttgtcccccagctccgcccagactagaacattgtgaggctaatgcctttctagcaacaatattttagtccccagcgctattctagcagcagggagtgctcaactgacgtggttttttcacatatatttaacatggtttagctcacctgacttatatattctaaattagtgattctaacttaatcagttttttaaaaataggctatcattatagaaatatccactttgaaaataggcacaaggtattcagtttctctttatgcacaggaaatatctatagactttaaagttgtatttattattcttttcaataataagctattaatttcaataaaaataaactattcaaattaaaatattcagcagcatctcagagctatgaatgttcagttaagcaaagaaagttttttttttttaattgggagatttttattttatattttatttttgatgagttcttttttatttttattttttaattttatttttccataagttattggggtacaggtggcatattggttacatgagtaagtttttcagtggagatttgtgagatcctggtgcacccatcacccaagcagtatacactgcaccatatttgttgtcttttatccctcaccctcttcccactcttccccccaattccccaaagtccattgtatgattcttatgcctttgtgtcctcatagcttagctcccacaaatcagtgagaatatacaatgtttgattttccattcctgagttacttcatttagaataatagtctccaatctcatccaggtcactgcaaatgctgttaattcattcctttttatggctgagtagtattccatcatatatatctgtatatacacatatatatacatatatatgtgtatatatatgtgtatgtatatatatacatatatgtgtgtatatatgtgtatgtatatatatacatatatgtgtgtatatatgtatgtatatatgtgtatatatgtacatacacatatatacacatatatgtgtatatatacatatatgcgtgtatatatgtacatacacatatatacacacatatatgtgtatatatgtacatacacatatatacacgcatatatgtgtatatatacatatagatacgcatatacacattttctttatccactagttgattgatgggcatttgggttggttccacgattttgcaattgtgaattttgctgctataaacgtgcatgtgcaagtatctttttcgaataatgacttcttttcctctgggaagatacccagtagtgggattgctggatcaaatggtagttctacttttgttctttaaggaatctccacactgttttccatagcagctgtactatgttatattccccccagcagtgtagaagtgttccctgattgtcacatccacaccaacgtctactgttttttgattttttgattatggtcattcttgcaggagtaaggtggtatcgcactgcggttttgatttgcgttttgctgatcattggtgatgttgagcattttttcatatgcttgttgaccatttgtatatcttcttttgagaattgtctattcatgtccttatcccactttttgatgggattgtttttttcttactgatttgttggagttcattgtggattctggatattaatcctttgtcagatgtatagattgtgaagattttctcccactctgtgggttgtctgtttactctgctgactgttccttttgcagtgcaaaagctctttagtttaattaggtcccagctatttatctttgattttattgcatttgctttttggttcttggtcatgaaatccttgcctaagccaatatctagaacaagcaaagaaagtttaccttttattttatctgtttactactttaaacaaggtaatgtgataaaaaggtcatgttaaggtaatcagggttaatgtatcacagattgtgttttaaaacttgcttactgcaaccttaagtattggtataatataatctcaaattgtctctttcagaattctcatgcaaagactcccgggttgccacagagatccctgtccatagggaggctctttcccatctctcctccctcccactttaattccaaactcaaaaaggcagattaatctaagcttaaaaaaggttttagtagaaataatttgaaaaccccagagccctgggatattgttggaataacgatttttagtgctttggaaagtaaaagttgatttttcttttctttcattcttccccatcccttcccccttaataaagttatcattcttgtcattttctagttttttttgtttggttcaagaggataagattatagaaaatagtcactaacatatcctgctatagaaagagatgattggaccttctatttggaaaccagaacaaacaaggaaacaaagaaacaaataattctgctttccgataggtgctggttttacttccgctggctgagctgttgttcctgaggtcagaccccagccagtcttttgtgtacgtgcaggaccatggtggctttagtttctaccccacccttcctaggaactctacttgtggcaaacgtatgttcaagcttacaagtcagcccaccccactctgataaatgcaagaaaagctgaaaagggaggagcaagatgggatgaaagcatctgggccaaagtgacctgaaaacctttagagaagaagctgctggctgagaaggaggtgtgtggctccggtgagaccaccagcttggaggactggtcatcagctgcacgttctgggtctgtcttgggtattcccatatggccatgagatccgggaggcacccctcgctgctgctgcttctagtgctgctgctgtggctgctgcaggtaagctgagcctgcagcctagtgctcaggtgcagggaactgaaagcaaagcacaagctggccctgccccttctaggctaagggaggggagagggactgagtgtgacctgctgggacccagggctggctgtcttgagaatggcttaggtagcaggggctctggatttatataaagggaagttaagggtcccagtctgtttggggcaacagtgggagcaggctaagggacctgtttaaaactaatttatatagttcacactatttttagtgagattacatcaacacacacgtgttttctttctttgtttctttctccttttgttgagacagggtctggcttcatcatccaggctggagtgcagtggcatgatcaaggctcactgcagctttaacctcccaggctcaggtgatccttccacctcagcctcaagagtagctgggactacagtaacttaccaccacgctggctaatttctgtattttttatagagatggattttcaccatgttgcccaggctggtctcgaactcctaagctcaagtgatttattcgccttgcccttccgaagtgttgggtttacaggcatgagccacctcacccagccaacacacacaatttttttttttttttgagacagggtctcgtcatccaggctacagtgcgtggtgacatctcagtgcaccgcaacctcctcctactgggttcaagcaacctcctggctcagcctcccgagtactgggactacaggtgcacgccaccatgcccggctagtttttgtatttttattagagacagggtttcaccatgttggccaggctggtctcaaactcctgacctcaagtgatctgcctgcctcagcctcccaaagtgttaggatgacaggcttgagacactgcgccctgccaagttttataatgatacttctgttcacactttacataagattgaggaaatctcagttgtctggatccaaggcaatttgagcaaacccatggggatggaatggctaaatccattgcccccaactgccactgtttaaatgggaatacaaactagtggagtcaggattcgaaacacatgggcttgctctgtttgtacttagagtggacagaggtaatgttgcatgcgcttgttggttatgatctgcttcgttggctttctgtaggtagggagagggaatcatttcttcctttgaataccagctgagggtgggaagcagcccagtggctggtaactgtgagctctggactgggctgcttggcgtcctgacctaggctccttcacagcccgctggggacctaggccagcttaactttgttccttaccttggatcaagttgaacttacctagggagcttcaagggatctcagtgcctgggttttgcccccaaaggttcaggttgagctgacctgggagtgcactgggtgtcagtgcactggttttaacataaccttgttaagcctatttttcttcacctgaaaatggagctagtaactgaatttatctgagccagtggttgtaccagtgaatgaggaaatgcgtaaaagcccttggtactgcgaaagttgtcagaatcagaatggagttccttatgttaaaacacacacacacacacacacacacacaggcacaaagcctgatatatagacacaaagaaggttatgaaaagggggttctcacatttgtaggcttgataactaaaactatcacaaaagctctgcaaaaataacaactttgcacaaaggccgttaaaaccttacacaaaaaatactttttcgaagaaatcttcccagcaactttttgtgcaaactcagaccagtgtcacccttcttattgatctttgtagccaaagataattatttcaaaacaatgatataatccttctcattttttcctttgaaaacctttatctccctttacctccctgactctgcacatcgtttaccatggcacacatattcccatggatatgtccttgcccagacaaacgtcatcttctcttagagagcctctgtctactattaggttcacagttcagtaacgacccagccgtttttctaatcacagtgaaaatggttggcaatattcattcagagctcatgctaaaactatttactggatacctgctttgggccaggcactgggaatacaccaataaacataatagggggaaaaccctgtctgaaagtggataacttgtttggtaccagttgcttgaggtttggagaattttcttggtcacattttgccatatcaagagttacgagtttccttagtcagacagcacattaatttgatctccaatacttcacagaagtcctttttagtagcccatgtttgcatggatttgaatatagtccagatcaaatcctgtccccatccttccctcactcctgctcctacccacaatgagtctgatcaggaaacagacctgaattctcttccctctggcgtattagtgcagtgccaaagcaaattaattgacttctgagggtggttgggtgggggtgggcagtgggaatgggtctgtggattgtacttcagtgattgatgacagcagctttatgtagattccagggaatcaagacagatgaagagaacatgattcaatagatgtaagaagtttttagcaatcagaatgctggacctttaactcttaaagagctttacacctggcaggtgctcaataattgtcaaattggctatgagtaacattccgttccattcctttacatccccgccccctgaattggcttattgccatctgtgacatctatgacagatacctacttccccctgttcagatctccatatttacaagctgataccatttctgctggagagctattgtgtccacaatagttttcctctgaaatccccacaccctttctttgtcatttggccatgaagccaaatcaccaagtcaggattctgttctgcaggtttatgtctttgttccaggttcagtgacaagtaatgacaagccaaggaagaggagttttctccccttttgtcatttccaggcctctgagctcatatgtcctcaccttggggctgtggcaggcttcaaagaccagagaagagggaagttttaagagaatgaaactgtacaatgagaaaagccacttatgattttttgttgttggtggtggtggcgttgttaccaatctgggaaattctgaattgagttacattttaataaattgttagcatttatgctctgactgaattactctttcagcccttcatttaagaccaacagagtgatgggttgcagaaggtggggatagtgtggtcagaggtgaagctgagagggtcagcaggggacagagcaggttggattctgtcctaagagaagtaaaaacactggggggaaaggggtgtgagatctgtgcttttaaagatcactcaagcctctgtgcagagaatgtgttaggaacatatattagtgtcctcagactgctgaaacaatgaaccacaaactggtacgtcggcttaaaataggagaaatgtactctcttgcagttctagaagtcagaagtctgaaaccaaggcgtcagcagggccaaaatccgtctgagactgggaggaccctccctggcctctccccagcttctggtgggttgctggcaatcccagctgtttcttggcttgcagctacgtcactccagtctctgcccctgtcatgacatggcatcatccctttgtgtctgtgttttcctatcgagacactgctcactagattagggcccactctaacccagtgtgacttcatcttaactgtaattcagttaagaattacatctgcaaatagcctatttccaaataaggtcccgttcacaggtactgggaattaagtcttcaatatacgcttttagggacacaattcaacccaccacagaaggatggaatgaatgggagagaccaatcctgtgggttcccgaggtggtggaaactttagctgtttggggtggaggcagagaagagctggccttaggaagtgaacttgacagaacttggacatggggatgagagaagcagaggcatcaaggatgacctttggaatgagtaggtaagtgtcttttgtggttagagagcccccaggatgggcaggattgtgagaatacaagctatgctatcagtctgggacatgtaggatttgagttgcttgtgggagatgccagtggaaatgttgcctagagacttgaataggaaaaagaggagatacttacgtagcccttgccatcctgagcactttgtgtgtgagtgttgtatgttaaaaaggaataataatagtaccttcatgattgggctgttgtgaggatcaaatacatacaaacacttatacatgtacgtatgtgggggttgtgcatgtgtgtgcacagatgaggaaatgcagactccagagcataaattacctgcccgacatcacatagctggtgaggggtagataaggattttttttttttttttttggcagggtctcactctgctgcccaggctggagtgcagtggtatgatctcaactcactgcaacctccgcctcccagactcatgcgatccttccacctcagcctcccaagtagctggaactacaggcatgggccaccatgcctggctaatttttatatattttgtagagacaggtttttgccatattgcccatagaacaggatttaaactcaggtcttctaaacttataaatccacatgcttaaccaatactttatactatctgcattggcctctagtcacatgtggcaatttaagttaattaaaattaagcaaaatttaaaattcagtcctatactagcactagccacattttaggggcccaattagccacatgtggctaggggctaccacactggccaggacagcagggacattctcatcttcacagagattttcctaggactgccctggtctagagcccagaagagagatattgggtacggattaaaagaatctctagaggaatctctcataggaaattctgtgatttctagggtccaaattctccctgaatgaaagcttaagaggctttcctcatcatccaaaaataaaaaaaaaaaagaggctttcctcactgtccaatttcattatcttaaaacctctctcctccatggtctttcaagcctgccacagacccaagctgaggactcgtcggctctcagaactggaaatgactgaagaggggagaaagactcctttcctatggctagtcattacttgtcactgaatctggaacaaagacataaacctgcagaacagagtccttgatccaaattctgctgatttttaggactcgaattctgcttaaataaaaacttgcatttaaaaatgaaatacttccaagcattttgggagagaatgatttctatataggcctcttagctctttagtatcctgtatagtcacagattacatcttcattcattcagagaattttctcccaaaagatgccatggctgcccagccaggccagcctgaatgatattggttacatgccccaggtccagagccatctgtcaaatcatgtgcagggcggaccatgcaatcatatgtctgcctggccccctctgataaagtggtttggtggacatggtagctgagggaacaagcatctagaaagaaccccccgcccccgaccccaggcccacaccaccgcattatagaaagcattatgtaaatcttttgaaagatttcctctttggacagactgcctaaatttggcacagatgagaaatataatgagagcacttacaaaatcattacagaaaatataacaatttccagtcttcctgcatcacccagatgagagatctcaagttaatttctaagacatgcataaagagaggagaaatgaaacacacacaacaatgtgaaatttaaggcatctctggcaaagtataaacatccaccatttcaaacctctttttgaacacttcagccagctcttacatgactgtcaactgtgccgtttatgtcttatcataataaaatgaatttacagagctttagtgttgaaagagcccttaaagacaccttgtctcataccctcaatttacagaaggggaaactgaggcccagagggaacaagaaacctcaatatattccttgttaataaccttggccacctggaaatacacctgtttcagaaacggaattaatttctttatcttttgcaagaactacaattttctccatttaaaaattatacacctgggtaggcccttaatttaaaactactgacattaatcaagaagcatccattgtctaaaaaaatcagtttgagatttcagacttaaactcagagtttaaacattcttttccttcaggtaaatagacagaaatataacctggccaggaaacaaatattatcgttagccctgatgctgacaatacaacccaataacatcacccacccaccacccaccatggcctcttgtattgtaatgtgaataaggataaataatgatagattctgacgcggacgagccaaccagagtggaggctctgtccctggtgatttaggtatcagtcctagagatttagcttatgtgggttatatttgctgataccatgatagctattaaaacagggaaattttaaacatatttctcaattcattggacataaccataataaacccattctatgttaataaaaatagcacatattttggaaactatccatatttttcaaaattccatttagtggaaaaagtgccactatctatatattttttgcaaatattttgaatgtccggctttaaagaaaacagcgggagtctcctctctgcttctgtattcagtctgttgtgaatttgtttggttggagtatatgaagaaattctggcctcgagcagatatttgaaaagggaggaatattttaataacctggaacagataattgtggatatttttctttgatattacaccaaaactcaatacactgtaatgtcttaacagttatttactgggtggaatctgaaaccatatcactgaattttccctactccgttccattaaaatccactggtctctcttgcactctggatgactcttttgcctgcacatgattttagaacatgatgtgttgatcattaggaagccattggctattgagttatgcaggtatttcctgtgtggacatatttcagcctataaaattaaaaagaaactattgctattatagtaaaaatctttaattattaggaagctttcatgcttatattggcagacacaagttttctaaaattctgatttttgcttgaaagattacatttatcagtgggaacagatactgtgcattgattgattttctcgaagtgaaagctcactttgttcatcatcaaggaaccgtatatcagataccctggcgtgaatcatcacagtttcttggttgttctttcaagtaaaatggtgttgcattaaaaaaaaaaaaaaaaaaaaaaaaaagtggcctgttcagctggaaactgaagcaatcacgcaagtacttttctttgagataaaccttctgccttgatgtacagcagcagtgccttgtacatacttcccatccactcacgaagagtgtttaaaagatgtacactcaagtgttgcaatttaaaacaattaatattttttactacttcatgagttctcaagcgattacagtaattgagtaaattcaccaattatttcattcttaaatgaaactagttttctttgtgtttctttttggtttttcctgcaagtgcgtgagcaagtgcatggtggtgaagaatacaatggggagtttggtaccactgccttcatttgtgctgaggcatcagcaattccactcaccaacgttattgttttgcaccatcagtgcaaatgtcagacagcaaaataggcaaacaatgccttagtgttcttatgaaagagtttggccttgtggactctcttacagggctgtggaaaccatactttgaaaattgctgctacagagaaacttttcatatatacatggatgtttattaccatagcatttttggtaatgaaaaactggaaccaacctaaatgaccatcactaggagaatggataaatagattattacctattcatatagtgaaatgttctacagcaataaaaatgaatgaactagaactgtaggtgttaacacacacatcctcccccaaaatgaaaaatcaatgataagtaaaaaaaaaaataataatgttatgggatgatgattactgtgaaccattatttaaaagtccaatccaaaaccataaaaattacacattgttatgaatatatagccatatctatgcacacagatacatatagtgaaggtttaaaaacatgcattgaaatgctaagtataatttaggatgagagttacttctgaggaaaaagtgagatgagggaggggtacacaggaagtttcaattttatctgtaacgatttacatctcaacacttcgaagcaaatagggtaaaagtatgaaggtttgagagaactaggtgatgggcatcattatgtcattctctatttctttctgtatgctcaaagcattttgctatcaaattttcttttaaataggaagactgtataacaagaaaaggttttattaaaaatgtttcatttttaaagacagactttccctttttattataactggcaagaatcttagtgctaaattgaatacccaatcttagttcctgaaattgtcttttttgataagtttttgttttggtataaaacttataagatttaaggaaaatacaaagaattccaaaataccccgtgtgaaaatttaccagttgtttatactttttgccccatttgctttattctagtcatcctgcgtgcacactgtctctctccctccccactcccaccctttcgtttgctgctggttctaatcatacattgcaggaccattctctctctttctttctttctttccttcctcccttcccttccccttccccttccccttccctccctccttccttccttccctccctccctccctccctcatttctttctttctttctttctttctttctttctttctttctttctttctttctttctttctttcttccttccttccttccttccttccttccttcctttcctttcctttcctttcctttccctttctttctttctttctttctatctttctttctttctttctttctttctttctttctttctttctttctttctttcttcctttctctctgtctctctctctctctctctctctctctgtctctctctctctctctctccctctctttctttctttccttctttccttctttctttcttctcagatggagtcttgctctgtcgcccaggctggagtgcagtggtgcaatcaaatctcactgcaacctccgcctcccaggttcaagcgattctcttgtctcagcctcccaagtaactgggattacaggcgcgtgccaccatggccggctaatttttgtattttcagtagagatggggtttcatcatattggttagttgctctcgaactcctgacctcaggtcatccacctgccttggcctcccaaagtgctaggattacacgcgtgagccaccgctcctggctgacttatctctttctatttcaacagtcttgtacatgtattttttggaggaagggaaaggattgttgagatataaattataaataagtattatcactctaagtcattatgtaaatgtaaagtgccatgtctattattttattaattattgtaaataatgtcttagaaataaggggcaaaaaaaacaaaagaaaagcccacttaaacctcatcaccaattaatatttggtgttattttacatgtgtacatataaatacagctgtgctcatcctgaataaacaagttctacttcctgctttgttaactaacagtagtattttatgattttaaacgtctccccaccattggtaataataaatcagaattcttttcattatttctcctatagttagagaagataagtggcaatcatgaattaagatgtagaggataagaaattctatttaccaaaactaactacagaagttctgttttcatcatttctaattctagatttgtgcaactccaggtggtttccatgtgattctggtaagaatattctctactaattaatattatttttatttttaaggtcagtatcattgacagtgttcaacaggaaacagatgatcttactaagcaaacaaaggtgaggtttggaagtcagtttcttaatatataaaatcagtctctacacttgacttagagacagaattgcagtttggagttctttagtgccctgccaatgtttggtttgcagaaaataaaatagtaacttcatgtggccttttagaatcttgagggactgccagagagttgcaggtgatgcttttatgtctaattagaatgtgagcagcctgtgaacatcaaaattcaactgtacaccataagcatggaggtttgtccacatcattttattctttatggaattaaaatatattgaacttcatattttccattgcagcagtcatgcacctaccactgtgaagttttgccatatcctcatgccacgttgtgattatttacttggtattgttctcttggtcaattcactctatcattaagtaatttttttaaaaaagaacttacatttttgttgataaaattaatgtggctagaaaccaacttcacttataatagatggtaactgtgaaaatatataatgcaaacaaaacaatgctttaaatttcatatattctcttacctgacaaatatctgagcccaagatctgagtctaagtcactctctttctctttgtgtacatgtctgcacatttgttaaaagggatagtcatagacagagaggcattaaaggtctgtcagcacctaatcatcaataatttcaggaagactgagagataaatggaagtgggaaaactttctcaacaaccgtttgcatgtctactataggacagccattggcacatagcagacagtcatctttaatgctatgtctggatagctcctgaaattatctcaagaaccacgtcaaatcatcggacagcatccaccccgtggttagagatgactctacagctattaagaagacaggcacttgggttttccaagcttaggtggctgttctggcgatgagagaatgcaggccaggtgtcagcacagggcctttacatgaagtaagggtgtgataaatcctggctgtgagcatcactgccatcctcattgtcaccagtgtcactataagttccaggaaaagatctaccagcctctacggcgatccaagagaagatgggttatcaccaccttggagctggaggaggaagacccgggaccctttcccaaactcattggtgaggtaaggtgcctactcttaaggaatgaccccatcatgccctctaagtaagcacgcccctttggccaggaagattaagtcttgaaaggttatgtgctagtgaggccagggagtgaagtagagcagaaggagcactggcctggggttcaggaagcctgggttctagaactcactctaactctacctggttatgtgagtttgaacgagtcacttctccatgtgagtgtctgatgagaatctcatacagcaacagggtggttaattccaactgacaggtctgctttatttggcccatgcagaggctttttttttttttaaatattatttaaaaacagggagattgtcggccaggcgcggtggctcacgcctgtaatcccagcactttgggaggccgaggcgggcggatcaggagatcaggagatcgagcccatcctggccaacatggtgaaatcttgtctctactaaaaatacaaaaaattaaccaggcatggttgcaggtgcctgtagtcccagctgctcgggaggctgaggcaggagaatggcatgaacccaggaggcggagcttgcagtgagccaagatcgcaccactgcactccagcctgggcgacagcgagactctgtctcaaaaataaataaataaataaataaataaataaataaataaataaataagggagattgtcttaaaaattttgcccttctaaagacttttaaaaatggaaagttctggccacaaggaacccacattcccacattacaacaattaggcggggcttgagttactcagaataccagtttccacccctccctattgcctccctcatgctgagggtgagcactgccttgaagaagtcacatggtattggaatagcagaatctttacaccaggctcatgttgtttatttccactaccttcctagtaccaatgggcctttgaattaagtgctgattaagttctgctatagctgtggcattctatgattcttagaagaaggaaatagtgcacgcctactgttaaaaacaaacataaagagtacagaaagttttcaagtctcagtggttaaaagtgtatatgcctaagagtcagggggagtgagtgggttcatattcctactgcaccacctccttgctgggtaagttagagatttttaacgtgtcctcatctgtacaatgcggtcaatgatattgcctacatttcagagatgttttaaagattaaataggttaaggcaagcaaggcatattgtaggcccactcattctaagctctttctaaatgttagttgtgtgatcactacttctctttccttcaagggataattgatattaataaattggtatgtgtggttccagatatttctctacagattttctgatgtgaatctgcatccaagaaatgagatcacacttggtgtgttgttctgcttgcctttcttgtttagtgatgtgtcctgctagtcattccgtggcagtgtaaatacatctttaaaggctacagagtatcccatgctatgtgaaggaagtatcattatattatttttttcatgttgatgaacatttatgctatttccaaattttcactgttacagaccaaactgaagctaacagttcaacatcattgttcctgcatctcagcccatctgtttatttctttggcagatgtgccattgctgggtataatttcttaaagatgccattgattcttagccttgatacttgattatcatagtggcttattctcatcctccttttttcttctttccatttttcctccttccagctgttcaataatatgtcttataacatgtcactaatgtatctaatcagtggacctggtgtggatgaatatccagagattggtttgttttctctagaagatcatgagaacggaaggatatatgttcaccgccctgtcgatcgagaaatgacaccatctttcacggtatctaaaacttgatatattctaagctcggatttaaaagctcttgcaagactgttgtatttggtaagcattatttaagctgactatgtgccaggttccgggagattgagaaattatgccttgtgacaagctttacgagtatgcctgagacttttgtaatcttcttttagagttgtggactttggctttgtaatgatttctgcaatcgatgtgagctgctataggtctttattctaatgaccagtgtcctagcatgatcgggatatcagaaagcatttgggtatagggtcacagaatgtttataaaatgggctaatttattttttgatgagtgacttctgaaatatggagacaagccataacagacccaatgggttgcccaataactgatgcatgagcagttgcatacctgttgacaatgtcttattgtgagtgcaggtgttctttacgatttcatcactgcaacactgtggtttactatgaagttgaaattcaggttgtaaactaggaaaggaaattataaagaaaaaagccctgaaccatgtatcacattactcacctaacatcataggaagtccttaggtagtcaaactttgttctattttgacttcagtggaatggagctgctgggaactgggcttggttctcaggcgtgcttggctgtacatttgttcattaactctttcagggtggaaagatgttgattaacattcaagaaaagtaatagttgaagcttttctccagtgatctcaaagtacttatatacacaataaaagatatacccttaactcactgataggctctgaatctctaatttttaaatcggtgaaaattgttctaaaactccaatgaacatgcaaagatgactctctaggtcttccttatctgtatgaatgcatgcctcccttctgtgcagaattcacagtgtctgttaaaaagaaggacttttaacagtgcctgttaaaaagaagagtagtcataaggagaccctgagatagcacttctcaatctttcatgagcaaacagatcacctagggatcttggtaaaaatgcagattctgttttagtaggtcagggtgaagcctgaaagcctgcatgtctagcaagctccaggtgatgcccatgctgctgttcctcgggcttccacacattgagtagggaggacctagtgatgatcatggtctgtgcaaggatggaaccaaacattcagtgctcacttgttgttgttgcttgtttgctttcaatattttattttttcctttccttttattattattattatttttaactttcattttaagttcatgtacaggtttgttatataggtaaacttgtataatgagggtttagtgtacaggttatttcatcatccaggtattaagcctagtacccactagttagttttcctgatcctctccctcctcccacccttcaccctctgagagactccagtgtctgtttccttctgtgtgtccatgtgttctcatcatttagctcctatctataagtgagaacatgcagtattggttttctgttcctgtgttagtttgctaaggataatggcctccagctccatccatgttcctgcaaaggacataatcccattcttttttatggctgcatagtattccatggtgtacatgtaccatatttgctttatccattctaccattgataggcatttaggttgatttcatgtctttgctactgtgaatcctgctgcaatgaacatacccatgcatatgtctttatgatagaatgatttaaattcctttgggtatatacccagtaatgggattgctgggttgaataatatttctgtttttagctctttgaggaatcaccacactgtcttccacaatggttgaagtaatttacactcccaccaacagtatatacatgctcctttttattctgcaacctcaccagcatctgttgttttttgactttttaataatagccattctgactggtgtgagatggtatctcattgtggttttaattttcatttttctaataatcagtgatgttgagctttttttcatatgcttactggccacaagtatatcttcttttgaaaagtgtctgtttatgtcttttgtccactttttaatggggttttttttcttgtaattttaagttccttatagatgctagatattaaatctttcagatgcaaaagaaactatcaacagagtaaacagacaacctgcagaatgggagaacatttttgtgaacgatgcttttaacattttaaatgatgtattaagggttggcattcataatgtctaaaatgggactttgtgtctaaaagctgataatgctaaagccaaatatctaacagcatttcctgaaactcgaagttgagttggaaatgcttggtgcatcacagatagatcctaggcaccatttagagcaaagagtgacagtgtggggtggggggaaacacatggcatccccattaattctgttatgtcaggttttcagggccctatgcttggagctccctggctaggccaaacccatgttctgatcccccaaacattgaccacagttgtcttttaatattgatttaggtacttatttgatccgtggccctgtcatttaactacagacttccacaaggaaagatacagggtggggattctgaggcatgccccaaccttgcctgtcactctccgtctcattaccctgttttattttctcctcaacaccactcatcacctgaaatgtgaattttgtgtttaattatctgttgatagttgatctcctccattagaatgctgatctcccctcttagaatgtagttctaagaggggagagactctgccttattgttgactttggggaaagtctgccattgccccagggtcaagatcagggctcctcacataataggttctcccttaatcatgttagatgaaggagtaaatgaatgaacaagcagagtaaaatgtagcctcggccttgctgggtgttgtgagttgaattgtgtctcccaaaaatacatgttcaagtcctaattcatggtacctacccctgtgaccttatttggatatagggtctttgtaggtgtaatcaagttaaaatgaggtcatactggattagggtgggccataacccagtgaccagtatttttagaagaagagagaatctttgacacagagacagacgcagaggagaatgccaggtgaaggtggaggcagagattagagtgatgccaaggaacactgaggtttgctagcaaccacccgaagccaggagaggcccggaagagtctctccttcggagcctccagaagaaccaaccctgctgactcctccatttcagctctagcctacagagctgtgagagaataagttcctagtgtaagccatgggggtctatggtattttgttacaacagccacaggaaactaacagccaggggcttacacactatttaggagcatatgaaatggtccaatgagaaggattaccaacaaggaagggtggcataagacatgtcctataaattaggacgtgtcctaaacactacacaaattgagcatcctagcttaaccatctgctcctgtaagagagcgtttattgttggctttggcagtccatcaagatagtacattattaaaaatcaagtaagcctaatgtagtggcaaaaagacattctagtagcacttctttactcttgagcatcctgatggggtctctaaaaccagccaaaagaaaaattgtgttcagggggtggtgtgggggaggctaacatttattaactccatgcatgtacaagaaagcagtagccctggttgagaattactgtaagatttgagacagaggacagcaacagaaaaagtttcaatttttttctgtgtatggaccttatctatttatatcaaaatatgctcatttttgtagaatacaaagctaccccaaaacccatctttttatatttctcaaaataattatttgttaatttttttcaccacacagtctaacctatgcagtagcgattttgtgttgtgcatttggcgctgaaggtgttcctatgtgctcatttgcatgtaaggccgcagatcttgtgcctgtaatttcaaacagccatgtgatgtatcaagttaatgcaccatggtttgtttatccaaaggtataaatcttgaggctataaccaaaggctggaaacactttccaagtgcagaaaatgtccatgacatttcttttctccattgtaacccgaatccctagaaattcttagcatcttgccaaagaataaacagcactcatgtttctcaggcatcttatggaactaaaggtctcatacgtagctttaggataataaatgaaatataaaataataaacataaaacacacaagtggttctttttttaaatggaaggagtacagttggcacagttttacagccagaagtcagggtgattaaggagcaaagagttgccagcacagtcatacattatggaggagaatgtagagatggtgagtgagaaagccaatttatttgcacaaaaatttaaaaatgtatgctggagtccctgcagcggactagctcagtggtagaagccctgaagcctccctcagtcctgctgtgggggaggaggagcactgacctgcgctagacgtaggggctgctgtgctaggatacctggtgggaccacggtgatggaagcagaggaatgagccacaagtctgcagggaaagggggctcaggcagtcatgcgaaacagtacagagggaaagacatttaggcccctgaggaaggggatggagagagtgttgcctaaagctttcaaggcccttagaggccccctgggagggccaccgaccctgggcactgagtagccatagagtgaagtgaggaagaatcggcggaaggtgcagtcttgatccctgactggacttgaatctgggctactctacttccaagctgaaggtgaaatagtcacttagtctctccatggtgcagagctggacagcaagggtgccttcctccagggcttccgcggggatgagcagaggccatctacgggaagggctggtgctggtgagtccgccctgggcctggctgaagctggcagccaggcttctgcaataaacctttttaccccaagcaggatactgtacctggcgaccagttgacccttgagaatccagtggtctgactgcagaacaggcctctgcctggaccaccctcgtgccaggatccgtgccctttcccactcccttttctgcgactctgaactcctgcctttgcccacagccttttcagccttcaacaaacaaaagcaccctttatactagagcaatgagagattcaggagcaagcctgattcgacttgcttttaaaaatatgtatatttatttaaaatacacatgtatattttcttatagttcatatttattatattttattaatatatatatttattttgtaagtagggacatcattttttcaaattaatggactttattttttagagcagttttagattgacagaagcacagaacagaaagcacagttcccatcctcccctccccctaccccctcccttcagattcccctattatgaacattttgcagtagtgtgtgcatttgctataatgtatgtgctacatttgctataattgttgagccagtattttacatgactattaaccaaaacccatagtttacattaggcttcactcttggcatcttacgttttatgggtttcgacaaatgtgtccaccatgacagtgtcgtatagaatagtttcactgctctaaaactctctgggctctgcccattcacccctccctacccccagaacccctggcaaccactggtctttttactgtctccccacttttgccttttccagaaggttatatagttggaatcatacactatgtagccttttcagactggcttctttcacttggcaatatccattcaaagttcctccatgcctttttttcattgtataatattctattgtgtggatggacacagcttatttacctattcacctactgagaaacatcttggtagcttccagagtttgacaatcatgaataaagctataaacatgtgtgtgcaggttgtcaggtgcacatacatattcaacacatttggaaggctgatagttggattgtgtagcaagagtacatttagttttgtaagaaactgccaaactgtcccccaaagtggctgcaccattttgcattctccccagcaataaatgagagttcctattatttatacttactttttttttttttttgagatgaagtcttgctctgtcacccaggctggagtgcaatggggtgatctcggctcactgcaacctctgcctcctgggttcaagtgattcttccacctcagcctcccgagtagtgggattacaggcacccaccatcatgcctggctaatttttgcctttttgtaaaggtggggtttcactacgttggccaggctggtcttgaactcctgacctcaggtggtccccccacctcggcctcccaaagtgctgggattacaggtgtgagccaccacgcccgatcttatatttactttttacatataaaattaatagggcttcttacaaaattttgtacaatatatgaaaaatctcaccccacccacaacttttctctctggtctaattccacagaaggagaaaataattacagagaaaatataacattcactcttcacttattagatttgatatgaagtttttaataacttctttgacaatataatgacctgagaaccctcaactgcctttattccttccaaatttatatgtattttacttttaaaaatttattttcaaaacttgtgtacggtaaaatttgtatctcttgatgtatagttctaagagttttgacaaaccctccttcaacccttaacccctggaaaccactcatttcttctccctcccaatacatttaccttgtttagaacatcatagagacggagtcacacaatacatggctttttaagtctagatttttttcacctcacataatgaatcttatattcatcgatgtcattgtgtgcatcaagagtttcttcttcttctatttttttttttttttttttgagacggagtcttgttctgtcgccaggctggaatgcagtggtgcaatctttgctcactgcaacctccatctcccaggttcaagcaattctcctgcctcagtctactgagtacctgggactacaggcgcctgccaccatgcaaggctaattttttgtgttttagtagagatagggtttcaccatgttggtcagaatggccttgacctcctggccttgtgatctgcccacctgggcctaccaaagtgctgggattacaggcgtgagccgccgtgcccagccgagtttgttctgttttatcgctgagtagtatcttgcttctcactttataaaactaaagggtgcttggactcttttcaattgtggtgagataaagctgctatgcactttttttttttttttttttttttttttttttttttttttttttagatagagtttcactgttgtcgcccaggctggagagcaatggtgcgatctcagcttattgcaatcttggcctcctgggttcaagcgattctcctgccttagtctcctgagcagctgggattacaggcacccaccaccacacctggctaatttttatatttttagtagagtcggggtttcaccatgttggccaggctggtcatgaactcctgacctcacgtgatccacctgcctcagcctcccaaagtgctgggattacaggtgtgagcaaccatacccagcccacatatggcttttatgtgaaagtcagttttcatttattgtaggtagatacctaggagtggcttagttggatcacataagtgtatgtttaactcgataagcaattcccaaacgatttctcagaataactgaacaattttgcattctcattagaaacgtataagaattctgattgctctgcatctttggctgcacttagtattgtcaggttttttcagtttagctgttctaaaaggtgtgtagcgatatctcattgcagttttaatgtggatttccctagtgacaaatgatgacttatttactatctgtatctctttttttggagaggtgtctgttcaaaccctttgcccattttaaaattgtattgtttttgtctttttttttttgagatggagtttctttcttgtctcccaggctggagtgcaatggcgcaatctcagttcactgcaacctccaccttctgggtgcaagcaattctcctgcctcagcctcccgagtagctgggattacagttgcctgccaccatgcctggctaatttttgtattttttttagtagacactgggttttgccatgttggccaggctggtcttaaactcctgacctcaggtaatccacccggctaggcctcccaaagtgctgggattacaggcatgagccaccacacccggccatatattgtttgttttcttattgagttttgaatacaaatcctttgtcagcatatgaaatggaagtattttctctcaggcaattgtcttttcatttttgtcttctcattcttacctttgtcttttcattcttttaacagcatttcttacagagcaaaagttattacattttgataaaatccaattcatcaatattttctcttctggatcatgtttttggtggtgttatctaacacattgtcatcaagattttctcctttttttactaaaagttttatagttttatgttttacatgtatgtctgtgatccattttgaattaatttttgtctaaagtgtgagatatagacccaggtttatttttttttgcttatgaacatctaattgtttcagaatcatgtgttgaaaaggctagcctttgtattattctcaaaaatcaatcaaccatacttgtgtgggcctatttctaaactctctattctgtttcagtgatgtatatatttatcttttcatcaatactatactctctggattactgtatttttataataaatcttgaaattatatagtgtgagtcctctaactttgtgtttctttttcaaaatgattttgcgtattcaaatttctttgcctttctatataattttcagatcagcttgttgatatctctaaaatattctgctagtcttttgattgggatcatgctgactttataggtcaatttggaaagaactgtcatcttggcaatactgagtctttcagtctgtaaacacagtatatcttttcattcaattaggtcttctttgatttctttcatcagtgttttaacattttcactaaatagatcctatacgtattttagatttgtaaatggagctgttttaaaatttttatttctaattatgcattgctggtttatagaaatatagctgatttttatagattaactttatatcttgtgacattgctgaaattgattttcgaaagttgaatcagcctaaaattctcaggataaacctcatttggtcataatgtactatccttttaatatatttctgggtactatttgttagtattttgttgagaacttttaactctagattcatgagagatattgttctgtagttttccctgtaatttacaaaaatttgactttgtattatggtaatattagtctcatataatcagttgagaagtttttctaccttttatattttttggaagagactgttgaattggtctttcttctttcatattttgctagaatttatcattgaagtcatctgggcctggagttttttgtttttatttcttgaaagattttaaactataaatttcactttaaaaaaatatataggactatacaggttttctgtttcttcttgagaaagttttcgtagtttttctttattaagaatttggtccatttcatttaagttgctgaattcattggcataaacttggtcatactagtccttattcttcttctaatatatgtagaatctctagtgatatcctttctttcattctcgttattgataattctctccgcttccttattttccctcatcagtccccctagaggtttattcattttattgatcatttcaaagaatcgcttttggttacatgcgattacgttggttactttctctattgttttgttgttttccattttattgatatgtgctcttacctttactattgctttctgtttgtttggatttattatgatgtctttttaaaatttcttaaggtggaagcttaaacaattgatttgagaccatttgaagtgaaagatttcacacatgcatatttgacgtggactgacttttcttatccaagtacagaagtaactgcagtggccatttaaaaatatagcatgtcagtagctgtgctagttactataaatgttcactttcccaaaaatctttaactgtctgctctctgtgatgtttcagtaatattcagttaatatatttatttctcatgacaacactgataggttgtagaaacggaggctcactagcaacttgcatgtgtttgcccagtggagagactgagatttgaacctaataataactgatcatttttttccaagccagagcattggcttgttctacacatttgctgagcacctaatctgtgccagtactgttcttgctctctggggtacttggtaaatgagggcagtctgattcctgccctccggaactctcagtctagaggaggagacagacgtaacacataattaggataacagttattttattagagtgtcatcgagtaaatggttctgcaggatttttacagctctctgcttcctaggtttattttgatgttgtggagcgctcaacaggaaaaattgtggatacatccttgattttcaacattaggatcagtgatgtgaatgatcatgcaccccagtttccagagaaggaatttaacatcactgtgcaagaaaaccaatctgcaggtgtgtgcggctggggggctgccgggcttccttctgtctctgctctgttccttttcattaatattgatgaggagcttgatcctagtcatcttcagggagagtttttactgttcacatctcaaagatcgcaggccttggatctgagcgaaatgctttgaggtccgtaagcctcattttgtatcggcaataaaatgatgtgggaattacatcagtgggaagggttgatatgtaaatgccattctaaaaataaagccacatgcagtgagggagaaagagctgggtgatgagcttctgcatatctctgcacattttttgtctgtaaaatggcaacacgatcacatctatagcctccgagttacagatactgtgcattcttaaacccaaccgactcttactagaatgtggatttattttaataacaaaaatcatttttttgtgtaatcatctctccaaaaaattccaagaaatgaaaagactgaaaaagaaagcatctttaatgttacccatgagagataacaaccattagtgtttcagtttgtattctttcagcatttttgtgtgcattttctgtgtgtgtgtatacacatgctgtgtgttaaaattatatatgtgtatgcattcacacatttttatgtataattacaaatgcatatttgtatatacatacattttttcatctttatcatagtacacattgtatatgcgtatatggtaaatatttacacatatttggtgtgctttttcacaggtgcatatttataaatttcctctctaaaggtgcaattttactgtttgtaacctgatatttttctaaaataccctgttgtgtaatattttatggatgtgctttaaagtatttgaccgatctcctatggttgaacatttatgtttttttgccactttctgttattttcataaaatatatttcaatgataaaatttaagctaaatctgtgtcccaatcaagcattatttacttagcatgaattcagagatgtagacttgctggtttgcactgtgcatacaatgtaggggtcctcatttgctgacctgcccccagtccacgaagatgcttggtgtgttgttggtctttgataactatgtgcttgaacattttgctatgtttcttcaccatttccatgttctatcagttgctttttcctttcttttcttcatttttctgttagtgtgtttgtcatttttcttgattttaacctctgcagtctatattaagaatatctgcctgccatgtatgtttcagatatattttcctgctttatcattttcttttaaattttgtccacagttttttgccagaaattaaaagtgtaatctgatccaccaatgtaagtcttctgcattggcagtcatgattagaaagttcttgatcttataactaattaaatattcatccttatcttttctagtatgtccatagtttattttatatttaaacattccactcattttggtatatgccccaatgccatttagcaaataattcatcctcttactggtttgataggctacctttatctgatagtaacaatttttaaaaattctttctagggcaacctatttttcagatgttagcagtcgatttggatgaagaaaacactccaaattctcaagtcctttacttcctcatttctcaaacaccattactgaaagaaagtggtttccgggttgatcgccttagtggagaaatacgactctctggctgcttagattatgaggttatgtggattttattattttttttaaatgaaatgtgtggcccatccttgagccccaggcttagattctacatttgtagtggggaaccctctgtggctagatttgctattgaaattcctaaacagaatatttctttattaatattttcctttcctgtatttgaggggcttaactttccttttcctcccacatagaccgctcctcagtttacactgctaatcagagccagggactgtggagaaccgtcactgtcatccacgaccaccgttcacgtggatgtgcaagaaggcaacaaccacaggcctgcatttacccaggagaacgtgaggctcctgggccgccccaacgtctaagccccaaaacaagtagcccttgggtcctaggctcagtttttctcagagagggtgttaggctgttatcatattgctgtgaagaaatacctcagactgggtaatttataaagaaaagaggtttaattggctcatggttctgcaggctttacaggaagcctggggctggcaccggctcagcttctagggaggcctcaggacgcctatgatcatggcggaaggacggggggagcaggcatgtcactcggtgacaacaagagcatgcaagacacgggaggtgggtggggaagaatgaggaacgagagaggtaagaggggccacacacttttaaatgaccagatctcatgtgaactcagggccagagcttccttatcaccaaggggatggccggagctatttatgagggatctgccccacgatccaaacacttcccaccaggccccacctccaacactggggatcacatttcagcatgagatttgggcggggacagatctccaatctatatcgcgcagtcacccaagatatgtgcaattctccaaagtgacttaagctagaatcaagaagccaaatcatattgacatagaagcagttcataatggtcacatgagcttacatttttgactgctgtatgccagaaactatgctaagaacttttacatgcatttttttcatttttgattattgaaactacaacacgatttctgttttacagatgggaaaactgaggtctaggggaagacagggaattcctgtttacttggagtcaggggttcctatgctcagcccaactgacactgggccagatgattatttggagtgggggctactctgtgtgctgtgggatattcaccagcatccctggcctccgcccagtagatgtcagtagcacccctcagctgtgacaaccaaaagtgtcaccagacattgccaaatgtccctcagggagaagaatcacccttgggtgagaagtctgcacctgaggttttcacaccgtgttcaggattctagagggaaggtgagcaggtaggctttggcctcgccttccataccttaccttatccaagtacagaagtaactgcagtgatcatttaaaaacattgtatgtcagggtccacatgggatttcccaggctgcaagactcccagcctttaagaaagcattgaaaaccgctgtgtaagatggtttgggatgggtgccccacctaaggcatgtgagatggctaagagataaaataagaatcactcaagatctatttccaatattttattttttactattctatatgtatttttaaaaaagtaaatatccaccatatttcctttctcctgactctctttcttgactactgagttaaaaccctccctcttctttcctgggacacactgtagctcctttgtgctttcttctgcttagtagtgttctacttaatcagttttatttattttataaatccccctacacacacacacacacacacacacacacacacacacacacacactcagctctcagctccatcaaggacggaatttttgcctgtcttgttcatggcatctgaaatggaatgtggcacatagaagctgttgttgaataaatgatgcaaacaattatttttaaaaggtgtcgtttaattagaaaaaaaacctgtataaaccaaagtgaaatgtttgcaaaccaaagcacctcaccagaagtatataataactacaaaataatattatgcttgaaccttgtttcaaaatcttttcctggcttggtaaaaagcaatgctctcaaaaatatggctggaaaaaaaatataccctcttattttgaagtgcttgtctagaaacattgcctccaaaagtattgaataacaagctattttgaagatctacatgtgttagaaaaatgatcaccttaatctgaataaccacaagtgtcctattttaggggaagagctaggatttttagagagcataaactaggattgtgtattattatttttaaaattcttagaaaaaatagggcattgagttggatttaagagtactttaagaattatttagcgagtcacaggtaggagggggcagatattccaacggatgcaccttctgctgtaacagacggagttgcaaatcccttagggcaggtttagcagcatgaggaatatccagggtgttgtgatgaggagcaacattctttctccttctctctcttgctctctctctgcttctctccctccttcctctctgctttccttttcaattgtgtttttgtttccatgacatggacatgatgattgcttctttcagtataaggttcagattcctgaaggccgagccagccagggcgtgttgcgtctcctggttcaagatcgagattctccatttacatcagcttggagagcaaaattcaacatattgcatggcaatgaagaggggcattttgacatttcgactgaccctgagaccaacgaagggatattaaatgttatcaaggtaacaccataccggtgacataccaaccagttagtggcagacgctgaggcctcttctgtaggatcactcacaatgaaccagggagctaacgtccgtggatgctgggtgctgagcccattacgtaccacacgtcaccaggcaaggaaggcagggtctcagtgccacttctgtgtgtgggctgaggactcctcctaccaaaatgatatcaataataaaacttattttgatatgactaaatacttcaccatttaattttttgttgttgtaggcaaaatgtaatagatttacataggccttaaaatgattattctttttcagatgtgattaaaaaatgaaaacattttcttcaacactaaaagttctttcttttcatctgagttttcaatgtttaagacttttaaagtttaaaacaaatgggagtgcatctgtgtggctccaagagtatggagagcccctggcactgtgcctaatggagaagctggcctggaagaaagtattaatattaccatctcatttactgattaggaaaccaaagcccagaggggttaggtcctttacacaaagccacacagcttgaggggtggagtggaggatcccactggggcagtctgaccccagtgcctctagtcttcattgctcacaaccagccctagagtgaccagggcctctagtgcagtgcagggcaggtgagtcacctggcgacaaggcagacctgagtcagcaggtctggcacagagcccaagattcgcctgcccatttgaccagctcccaggggatgctgatggcctgcggaccgtgctatgaatagcaaggctctgtagacgctgcaccagatgcctggggttgaattttcaaaatattcccaggctttcaatccttttaagtcaactgaccactttgtaccctgaataactatgatcattaatatctatatttccctaagttcccctgatttttttgctgcatggttgtctcattaatgtttcattaggctatggtttttgttgcatttttcattaccctctgaaggatggtggctcttttcaaccagcagaggaggagggaaaaaataaaagagaaaagaactccataaatgatttgaaaatgagctgtagactgtcttttgatcattatcaaagacaacgtaaataataaatgaagtgcaaaagccacaagctctgagtttgcaatgatgactcggcgctgggcttcctctggccagaggagcagcaggtgctaatgaaatcctctctctggggttccagcctttggattatgagactcgcccagcgcaaagcctcatcattgtcgtggagaatgaggagaggctcgtcttctgtgagagaggaaagcttcagccgccaaggaaggcagcagccagcgccactgtgagtgtgcaggtgacagacgccaacgacccaccagcctttcacccccagagcttcattgtcaataaagaggagggcgccaggcctgggaccctgttgggaacttttaatgccatggatccagacagccagataaggtgagaagagagggccaagaagggcggttgtttaagtggaaatagccacataaccaagagggctcctgttagaaaaccagctcggccgggcgcggtggctcacgcctgtaatcccagcgctttgggaggccgaggcgggtggatcatgaggtcaagagatcgagaccatcctggctaacaaggtgaaaccccgtctctactaaaaatacaaaaaattagccgggcgcggtggcgggcgcctgtagtcccagctactcgggaggctgaggcaggagaatggcgtgaacccgggaagcggagcttgcagtgagccgagattgcgccactgcagtccgcagtccggcctgggcgacagagcgagactccgtctcaaaaaaaaaaaaaaaaaaagaaaagaaaaccagctccttggacgtgttcacgaggttgcctcagtctccgtgatgaaaatacaagaagccacagtgcatgaccactgacctgagttaaatgtcgtcttctatccataggtttttctgaccccagcagaagaactcacttgttggttttcctttgcatcttccatgtgttccttttgtattctttcctttgtgttagaataatccgttacatttttctgtctccccctctgtaccagaagttataaaccagtacctctcttgcttctgggcaagaaaagtgagggttttttttgtaaattgtggtaaaatatacataaaatttaccattttatccatttgtaagggtacgggtcagtggcattaagtgcattcacatcgttgtgcaccatcacctccctccatctccagaactcttttcatctggcaaaacagaaactctgtctccattaaccactcattcccccttctccagctcctggcctccaccatttgactttttgtctctctgagtttgatgactccaggtcatcaaagcagaatcatacaacatttgtctttaggtgactggcttatttcactttgcataatgtcctcaaagttcatgcacgtttagcatgtatcagaatgtccttccttctgatgctgaatatgcatatgtggtattgacacatttttgtttacccactcatccatcgatgggcacttgggtggcatatggcctgaatctcttgatgttcttgaagaaatggaagaaattggcatttttgggtctatgttccatgagaccatgatcatggggacagaaaggggtcatgagtcatgccccttctctctccaggctgagctcagcagttggccccagaccccattccaccagcttcactcatttctcgtgcttacttggccttggtccacacttcagtgtgagattcctctccttacagcaacacttctcaacttatctgttgggaatggctagattttttaaaaatttacaattcattatggagtgataagtttgcaaaatataatgaaatggaattactagaaaaattttcatgcactaggtggacatgacaatgctgatgactctaagggcttctcaacacttgctcttcatttttgcagttatctcattgtgagcagccaaccaacagctcacagaccccttctggtgcacagtggtgcaccttgagttagcaaggctcttaagaagtagctgtcaaactatagtgtgtatcagtctctgggggaacttgttaaaatgcagattgctgggccccacccctacaatttcttttcttttttttttttcttttttttgagatggagtctctctctttcacccacgctggagtgcagtggcataatcttgactcactgcaacctccacctcccaggttcttgtgattctcctgcctcagcctcctgagtagctgggactacaggcacatgctgccacgtctggctaatttttgtaattttagtagagacggggttttgccatgttggccaggctggtttccaacccacccatagaatttgattgagaggtctggggtcaggactgagatttgcatttctaagaagctcccaagggtgcccatgatgctggctggggatccctttaggcaccaccaacaggagcctttcctaattcattgctgtcttcctgtctcttgaggatggttggctcatacttaggtctcaggaaatgtttggactgtgctgaaatcaagaactaacagtccatcattttagcctcaatatggctttttccaggaggcaggatgagtgtcttttgtgacagggtggaggcatgatctgggttgggggcagctttggtttcctctagttctgcttcatctgcattagctgagggagctgccttttggcctgagataatccacagaggaactctgagtttcttcccctcgtttgtaaacattgcaaaatcacagtgcttctaaggaacttctggaactttccctaagaggtgaagcagtgcacaaaaagcttcaatccctttaaaaactgtgacccacgcaacatgagagagggatccttgctgaccctttgaaaaacatttgcccagaagatgaaggaaaagcataaggagaaactgcccctctccgcacctttctgggacctgcactttttgttgttgttgttgtttgcctgagtccaggaggttcctgctgcggtgccctcaacaggtagctggggtggcaacctggcaaggttgcaaaggatgcaatccaatggctgacagctctcaggaatgctggagggcttggcgtggcccaccccttacagtggtgtcaggttcacataggtgagggggatgtagaagaccactttgaggaatagggttacccaactgtgaactgccagggctctgctgcaaagggaacacaccaggggtaaagtcctaggtttctgttgcaagggcaggttggtttttcacactaagctaacatcatctacaggccactgaagatgggttcctttccaggatgaatcatctccccaaggcagacaaaactatgttcagtccaacaaggagggggacgcttggtcttctggtgaatgtcaattccacagacctaggagagtctttaggctgtcctccctgtgcttccattcctttcgtgaattaaacactctcgtagtttaattgctcttagaatttctcaaattacttgtggtagaaatagtgtttctatgacatattttgtttttttatgcaacttttttatcttttaatgtaagtttttaattttaaaaattgctgtccgttttccttctacaagatatgaactggttcatgacccagcaaattgggtcagcgtcgacaaaaactccggagtggtcatcaccgtggagccaattgaccgagaatcccctcatgtaaataacagtttttatgtaatcatcattcacgctgttgatgatggtgagtgtttacccaaaattggaaaaataaaatgctcattcttgcttcctgcgggaaaataaccctggtgagcgtctttcagcacagcagagaaaaggataaaataaaccttgttatcactctgcatccatgctggtgattatttttggtaataattcttaaaatggtaaacaagggaccaataccatcgaaagagggcagtattcattcagaagagacaattaaaccagcaaggaggctgcaatcaaacccagcatctttttcatctgttcatgagctaactctttagctctttgtcaaagccaatgatgtgtgataaatatttagcacagcttccctgtgcttgggatggcatacgagctcagataaatgggactgtaagggacacatttgtcataaaccagaatgggtggttttataagcctgtttcagcatttttctctacactctcctaaggctgaaactttaaacacaccaaagcagagttgaagaaataaaaatgttcaaataactttaaaattgtatttaagaaagtctgtgaactaaaacccaagctccaagtgatatatcactatacgttccattctgtaattaactagtggaatgttggcggggggcaatggagatatgaaacacgtgttcctaatcagcattaagggaggagaaaaaatggggccagtgtttcagggttccgtcattctgttatggatgattttatgattggtactttttttttcctttattttttgctttttgtatttcaaaagcttttggggtacaagtggtttttggttacgtagatgaattatgcagtggtgaagtctaagattttagtgcactggtcacctgagtagagtaccttgtatccaatgtgagatttcttagcccttggctccctcctcccctgcttctgggtctccagagttcatgatatcactcatgcctttgtgtatccatagcttagctcccacttataagtgagaacatacagtatttgattttctattcctgagttattcacttagaagaatggcctccagctctattcaagtgtctgcaaaaaaacatgatttcattcttttttatggctgagtagtattccatagtatacatatgccacattttctttatccactcattggtcgatgggcatttaggttggctccatatatttgcagttatgaagtgatgattgccacttttttgaattagaaaaagtcgttttagataattgtagattcacttgcagttttaagaaataatctagtggatcctgagtatcctttgccagttttccccaggggcaacaccttgcaggactacagtgtaaccttgtaaccagtacatcaacgcggagacgcagcgcatttgcctccccttggggacccccatggtgcccttctttagtcacacccattttcctccaccccacccatccttgatgcctggcaccattgattgaccttttgtttttttaatgaagccacattctaccttgttctacaagtgatttgaggtggtaagtgctttattagcttacccaaatattctgaatgctcataaaagcaggaaaacagatcacgtgcatgccaggagagcttatgacgttgaaagggaaacagttccagtatttcaggaatattttttttctgagagacggagagtgctcattctccagagctgtgtgtgcacgagataaacaactcctgaaacttcctccccatacaaggcttcccaccgcagactgctacagggaccctaatgctcttcctgtctgacatcaatgacaacgtcccgactctccggccacgttcccgctacatggaggtctgtgagtctgctgtgcatgagcccctccacatcgaggcagaggatccggacctggagccgttctctgacccatttacatttgaattggacaatacctggggaaatgcggaggacacatggaagttggggagaaattggggtgagtttttgtattggttacgggcaaagagtggaaaatgccagatatccaattcaaacagatttaggcaaaaaaggactttattagcttaaaaaaccggagaggtctgcgttctggcagagctggctctaggtgctcaaaggatatccctggatatccttcccacacatggtctgcctttctctaggttccttcttttttaggaaactctcctcatcagggggtaggaggctgctgggagtccctgagacatattcttgcatctggcaagaagggtgtttccagggaagctccaggattgacgtcactgtttggcctgggtcagctgccctgtcaatcactgtgggtgggacttgggagggcggatgtgctgattggctggttcccagcccacacctggaccttgttgggatctgggctcaccctctcctgattcatactgagaattcaggaagtgtgggcttccctaaggaaacactggggcactgttaccagaagatgaacatgctgagcaggttaaaagcaactggcatccactgtcaacactctcttctgtgcctctagccgtggcgtctgtagactgtggcacggtttcagctgaaactgtgtgctcaagtttgtagttctcagacctggagtgtgtggtaaagcacttcgccttgcccaaagagaggtctggtctttgtccttggggtctgggtgatctctattggggtatcatgtctgacaccagtgtctctttacctggggtgtcttgggctgagccggataggggcaatgtgatttacactggggacttctggtcacatagtatcagtctattaccagagaggctggagactgaggccgcccacctgggaggcccaccaggttgcctgaccaagccccaggaggacactggagcctgaggctcaggtgaacgtccctgactgcagcatcccatgtgtgctgtccctcatcgatgctgacctggcttctcgggagtggatgatgagaagctctgctactggtgcttttctggactctgccctaggtgcctctttccttgtgtgatttacgtctgtatcttttccctgtaaaaaacggcaccatcactgtaacaactttcagtgtgttctgtgagtctttctagagaattgttgaacctgagggtggtcttaggaatccgtgaacttgcagttgatgtcagaagtgagggtacccttgaggacccctccctctaactctgcagttggcttactttcatacagagcttggcccgtgcagggcgttcagtaagcgtgtgttgagcagatgagcagatgagtgagtcaatgcatgccatgttctttttccctttgcaggtcaatcagttgaacttttaaccttgagaagcctgccacgtggtaattacttggtgccactcttcattggagacaaacagggactttcccagaagcaaactgtccatgtaaggatctgcccctgtgccagtgggctcacatgtgtggagcttgcagatgcagaagtggggcttcatgtgggggccctgttccctgtctgtgcagcatttgtggctctggcaggtcagtggtctgtaggggtgtcctgggactgtggctcctctccccaggcaataggccaggggtaaggggcttgctggggtaggggacagcggtggcaggattggtggaatggctttgagaatgacttctgggtgtactcaggctcctagatgtagatcagaggttgccatgctggccaggcaagatccctggccagcaaaagcagcttctactcacaatggaatccactggtaaatatagtcaaggagtggccctttgtttgtaataaccatggagacagcaatgtacagatattcaggctcctggacttggcaaggctaataagaaagcagcttttccaagaaacaatacaatattactggccagatagtattattgattaattcaacaaacagttatgtagcatctactggtaccctggaactgtgctgaactttatagctacacagatgactaagacgcaatttggccttgccagttcatgactgagttatacatgaacagaacaagatcctcatgaaacctctgatatgggtgagcttgtctaatctgtttttcccctttgtcttataacagtggctctgctttttctgttgcgatgctattttgtgcttgaacctaagaggcatggatgctctgtatccaatgatgaaggccaccaaacactggtcatgtataatgcggagagcaaaggcacttcagcccaggtagtggaatgtcatgctttgtgtcttatggcaaggaattcactaatacacagacatatagcatgtatttttccccccattgtgccacctcttaattcttcactcttacccgtgtttcagtagcaagtgggaaaaaattcttgcaaatactatctaactcagataaatgaatttattcttttagatcaatggttctcaaccatgagcaattttgccccataggagatattcatcaatgcctggagacagttttgatggtcacagttaggagtgctactggcatctagtgcgttgaggtcagagatgctgctaaacagcctacaacgcacaagacagcctctaccacagagaattatctgccccagtttcctaagtgctgagtttgagaaactgtgcttagggaaatagtgttttttattaagtagacgttccctaaatgggattgtgttaggctcactagttaaatgagtctgagctggcttcttggccatggctttcagtagatcatggcagaacctgctcttctaccattgtccggcaaaggccaaccagaaagctcactgcccttggaggtacaaggcctaggctctgtttctgcttttgcatctcattagcttcatcatttaaccctacatcctcatctgtgaactgggatgataaagtcaaattcttagataggttgtggatcagagaggatgcctatgaaggcacctaacacaaggcagagccatataaagtaattggccaatggccactggtttttcaaactggctgcttctgaaatgggccctacattatcttagtcatccttgcagcaaccctgggctggggttagacagacaaagagatgaaagcattgtgagctctcctgtttgtcttcatctagaattaagtggttgatttagaaaatgaacacaaaagaaatgtcaaaaggaaacacacacagaggattcggtcaccccatcttacacctccaccaatgtttttttcctggaagggagagacttattgaatgaagtcagacatttagggaaaagatattccaatgaacttgatatgatgctcctgtaattagagagtttctcaaaaatatttgattgaagaagctggtgctcgcccaaggctcccagggttctttgaattttgtcttccctgcggcatgaaggagggaagggagcagccacttaggctcctctggcaggtatgtgcctgtgcaccctcctgtgagcccttcctgggtggggaaacaggagcaagatccaaactctccagattgtgaagtcccctggaaggaatctccgcatcccaaatgtgagagcagcagtaaacttgatttgttgtgtaattttaagaagaaaaccatctggacaaacagcagtctttgtgtaacagtagaatttcttgccttggacagttccagtggctcagaggctcaaccatgaagggaaacagaaatggttcccagtcccaggagctgtgcctcagtctcctccttggagggagagagtgaaagctgctgagcttggaggagactggcaggaatgtcacacaacctgagttcaggttgtagctgaggtggaagggacagtggggatgccctggttacccttctttcccagcagctttgtgattgtctcttggaaaagaggaagcagctatggaagcagtgtgggtggaaaggaaccttggcccttgtgatgctaagaccaggagggttggagggggcttaatgacatggtggcactggtcaaagaccagctatgccagtgggacaagagaacctcatgctgggcaaggggctctgttctcttcttgtaccaacaaatctttctcttgtttcccattcacagctaaaggcacatctccattcctgcttcagtatcttagggctctgagaagtggaattcaacagacctgggtgtagattccaaatctgtgattgatcagttacataatctaactgaatctgactttcatatataaagtgagcttgatagtcttctgtctcttaagttttttggactctaatcaaataacacatgtaaaattttcagcactaagagtcatgcaataaagggtggccgccaatattagcattattagcagtaattactgattatatctctgtaaccttggtaaataaggccatctctaggtgcacttatccctctgtccatcttacatgaatataccagcttaccttgcacatccactcaccaggaacattctgtgctcttgggaaaactccatgcaagatatcgtcactagctgcacacatgttgtcacattctactactaaactatagggatgccatctgatggtgatgatctacagaaatgcatagatgccttccctgcatgtggggaagctaatgagcccttggccaacagaaatccagcacccatcaacctgagtccctcagtgaacatatatgttgagtgataaatgaatgggacaatgcacagaataccatgcaatgctggtgaccccaagagccatcaccatgagccctaggaaaagacaagcttttcaattctgagagctcctgaaatgagccttttaccatcagtttacatggaaccctgaaccatgagaagctcaacctcccagcgagcaattacaaaaggcaaacagaaataacattcttttcccacataagtcatccagatttacaggagaggtgtattttttacagtctggacttcttctgtgatggcatagatacaatgtgttttggagaaaatgtcattcctttccttctgtttttatttctgctatctgtgatttcagcccttgtcatatttctttctctgtgttctacagacatggtcagatgttgaaggccagaggccggctctgctcatctgcacagctgcagcaggacccacgcagggagttaaggtaacatgccccttacttgcttctggatttcagagaagtgactttcctggtggtttccctgacaaggaacacctgggatgctcctcccagtgccacatccagggaggttcttcttcaagtcagcaaccccagcccctacttgcaaagccccatggttcccttagcctaaaacacccttgtctttcagtggccaagttctttctactttgctgcggtgtcagatgaccctgtgcttccaaatatcactgtgtccagtgccatatggtgattttttgccatatgcatatggcacttggactagtgtatttcttaagacacttttttcttaaaatgggcttgtgtccacattaagtacatttatttaagtaggaaattttatatttcaactgtaaatgaaaacagttttacttgtataaagagcaggcaagtgtgaagatagccatgaaagaagtagggcacaatgactgggtggacgatggcactgccaaaggcccggggcccctctgcaaggaaggcagagcgtggaagccaggctagcaccagagtgacacttcctcctggatgtcataagggtgtggaaacagaattagaaagggaataattttctcaccgtgcaaatcagtgttatttaaaattgtttcccaagtagctaaatcttccattctataactagtaggtgtcccctactttgaaaacaaagttgacccaggattgccataaatgagcatgtgcctggccagggcagtgaggagggctgggttcgccgtgcattctgaccactagtctgtgctcctgggggaagggctgcccttttctagttcctacaaacttgcctcctgggctggcgagagccttctctttccttcctctgagccagtctgcaaacttctagaggtctaggtgttgccctgaggggcacactatgcactttgcatgcctcatcttattgaattttcaccagaacccataggggcgtgtgtgtggtaggggcaatcttgcttccctattttacaggggagggaaccaaagcctccaccttctaggttttggtgtatctctgggttcccttcagtgtcctgcaaatattgtagtaagtacatctctggtgactgcttaaataaactgccattcacacactttctctaagtgaagccgtcacttatgatttatggggtaacctgatactttaaaatctgctggatagtgtgaaatagcgtcaatgagaccattgtcaaggtccattgcctgctttattttctttgaaatataacttcattattgaagcgtcactattaaaataacagaaacccaaggcagaaaatgcccacaatcccatccctgaatctaaacagtttcacctgtgagtgtcaccttctagatgtcatctgcgtgtctatgcagttttcaggtgtctgtgtcatggaaagaacattagcgtcttcatgttcaaacctcctcctgccatgcggttccattgtgcctgcccttttatccctgcattccctgcctctcttcattttccttttcctcccaccgcgccctccctctcatcgtgttaatttgtgtttgcctatgaatatatgagcaaggggaagtggtgagaggtcacgcatgcccactttgtttccagctggagagaaatccattctcttttgagtaaatcagcattttccctctaggatctcgaggaagtgcctccatctgcagcgagtcagtcagcccaagcacgctgtgctctggggagctgggtgagttccagaaggttgctccctgctacggccatctcactagtgactaacagttggtccccctgagagagggccgttgtagaagattcggtgatactgtcagaaaaaggcacatagtcaatgaaaatctgagaagctgggctttttccacccgactctatttccatctatagaactaggtattattattggtgatggctgctgtttttagagttgtttgataatcctgatcaaatatgacactttttagagcatccacaaatagatacattttctcatgtccttctaagggcaccagagatcatctataaagttaaaagcacagcactttggccctgactaaattccagcccagtgactgcatgcttccagcgaaagggaggcctgacttcccatctgtgttgtgtcttcttgtactctacatacaaattccaggactattgctttgtgaaatgactttttctgaaataattttagactaaatagaagttgcaaaaatagtttggagagttcttgggggtcccccaaatataccatcttatgtaaccctactccatgatcaaatcagaaaatgggctttggcacaacactgtgagtacagttctcagtcacagaccttatttggacctcaccagtttaactagccattatttaaccaaaatgtacttttctgatatagaattaaaagaggtattcagggtctaaagagccatagaatcatatccaatttttatgagggaaagcttctaaaataaattcaagatctctataatttcatatctttgcacaggcagtatctgagcaaagatgaaaacatgatgttcttctttgcacaaagatgatgccacaaatccatcactgaagggctcccgcattgatgaatgttgggttccatgtccttgcagctgatccttctggtcctgttcgggccagctgcatggacatggaacacccaccatggcacagggcctcccactctaaagaacctctgcttggtttaatattctactgtcaccatcttgaaattcttaatttttgaacaaagggcccccaactttcatcttgcactgagccctgagagttgtgccgctaggcctgggtcctaggagtggatgtgtgtcatttgtttgtattcagggcatggccatggcaaaaggaaatcttactgggtgttaatggacccaagatagagcttgcaaatctaatattctcatgttccttcttcacaaagcaactgtgaaacttgttcatgaatttctgctatgaatatctacactctttagaattactatacctttagtacaaaaatgaaaggcaatatgactgcaagaatttctagttatgtatttgcatcctttggtaatttatttgaaatcagtaaatatttcatctttctttaagggttatggcaagccctttgagccaagaagtgtgaaaaacatacactctactcctgtaagtatagatgtaggtgttaccgtgaacaaatttaccttattgttctgcctaaaagctgtgcaaatccctgaaaattggaaatttggaaggaaagaggtgataaaaaaaaatatgcccaacatccaagcaaactgaaggagaagcgaacgtgaagagaggttggaagtagttaaggcacatttatcccgtgactcgagggcataagagcttttcagtccctggcaaatttcttttgctgttgagttgctaagacctcagtcataggctgagttttctgctgtgctttgtcacagacctatagaaattttgagctaagggggtcttagacatcatctagtcaatttttttttctaaatatgttttgcaccagaattcttcttttcaaatgagatcctacaaataactccattgtaaataaaacatctaagtactaattttgtatgcattgacattaatgacatatacctattaccaaaatagccaataaaaataatgattctgatgtaaacagaaggaagttgaatgttgtggatatagtttgcaaaattatgttaacttaacacctaattcattgcctcgcattattataaactggtttttaaagtatcaagaaaattttgatatataccaacaagcagtttcaaatcttaatggtttttgaatagctcagtttacaatgttaggattctctttgattaatgaaacatgggaccaaaagcttcatttgagttgcataaaagctaattaacatggcatcccaaatttacatgttggtgtgggagactaaaaaagatgtaaaccactttctgttatattataaaaataatattcaatattgttattgaaataatttgtaaataatgaaaataaatttcaaatactctagctgaagtatctttgaggagtcgtaggccctggggatagagttaaaccagtggctaagtccacagaagcccagagaggagagatagtgctctctcagccacagtgcagccatacatagtgtggggttaggacctgaagctggcttgaggcaaaatcaccccaagtctacctcgggaaggagccaggctggaaactgacacggcgtcttcctctggtcctggatgagccccatgcttggtcagtgagcatctggtgcaagggtactttgtacatagcccacatcttaagggtcctcctctgagaggcccctggggctaaacagactgagggcacagcatctccagtcaagtgctcccagcactgggaaccaggcagcagggtccctagggctgcttgtagtggtccacaccttgcctctttggcttagtatgtttggttcagcttaccttggtatgatgtggcttcactatgtgtacacacatgtgtatatgtacagtcatgtctggcttaatgatggggatacgttctgagaaatgtgttgttaggtgatttcatcactgtgtaaacttcataaagtgttttacacaaacctaaatggtgtagcctactacacacctagacctcttggtgtagcctgttgcttctaggctacaaacccgtacagcatgtgactgtactgaatactgtaggcaattggaacacaatggtgtttgtgtatctacctacacaggccagggcgccgtggctcacgtctgtaatcccagcactttgggaggccgaggcaggcgtatcacgagatcaggagatagagaccatcctggctaacatggtgaaaccctgtctttactaaaaatacaaaaaattaactggacgtggtggcgggcgcctgtagccccagctacttgggaggctgaggcaggagaatggcatgaacctgggaggcggcgcttgcagtgagccaagatcgcgccactgcactccagcctgggtgacagagcgagactccatctcaaaaaaaaaaaaaaaaaaaagaaaagaaaaaaacacctacacatagaaaaggtacagtaaaaatacagcattacagtcttatgggaccagctttatatatacggcctgtcattgaaatgttatgccgtgcataactgtatgtatgcatgtgtatatagatagatatgtgtattcagttgacccttgaacaataggagtttgaactgtgtgggtgcacttatatgtgggttttcttctgcctctgccacccccgagacagcaagaccaacccttcttctccctcctcctcttcattctactcagagagaagacaatgaagatgaagacctttatgataatccacttctacttaatgaatagtgaatatattttccttaatgacattttctttcttctagcttactttgttataatatagtatataatacatatgacatacaaaatgtgcattaattgactgtttatattattggaaaagcttccagtcaacagtagactgttagttgagttttcggggaatcaaaagttataggcatgttttcaactgtgcagggtcagcacccctaacccccacattgttcaagggtcaactgtatatgtatatgtctatatgtctatatgtatatgtatagaagcatgtacatgtacagaggcatgagtatgcatatatgaacatgtgtatgtttgtctgtatatgtgcatgtgtatatatctgtatgtatgtatgtatgtatgtatgtatgtatgtatgtgtatatatagcctcatggacatacataattgccccaggctttatcatattttacatatgtcttctggaacccaataagtatccctaaacccaggtaagatcagaagtcatctcagccataaaggccaccagtgattaaaaacacaaattgtatgtcactctccaatttaagacttcctgttggcttgccattgcacctgggataaagtctacaaccttatgaccttaaggggatcctccctccagggctgctttgcagaacccagcctaagacagacctatgtctttaatgtcctgtgagaccctctatcacatggcctttgctcacgtatggcttcaacttgctctgagcctccccccacctccctaaccatcccagcaccccacctctttgggctccagccacagaacacgccaagttccctccctgcttagggcctgtgctgtttcttctcattggaattcccttctgttccatggccctacaacttcctcctcctgagaactccctgctctcaactgggtgagatcccctcttaaaccttcccttggtgatcagtcttacatttaccgccactcttgggtgcttgccttgcacctgcgtgagctcgacagtgaggccccaggtgctttgcttgcctccaggccagcctgactcacatgatttagtggtgggatttgtgagcccccagatagccactccttccagtagatgccaagcctgtttcctaccactgtatcctctgcccttagatagcacagagacccagatccacagacatgggccagatgagcaggagactgccagcagcccatcatgggaaacaatgggcaggttcagaggaagagaagccaaaatgagcgaggaggggcagtgtagttgagggggtgcaaggcatgagtgagggtgtcagcaggaacaaccctcctggccgggctcacttgggttccttcctcactgaaagtttgtttcagcccaggcattggaaagtctagccatgagagcttgcagggcctccctctctcccccaacacaaagagaggaaacgtgagcaaactaccctgggcctggctcttcacctccaagagaacggtgctcagtgtgccccatctatgctggggccactgacacacaggggttggggggtaggacaagggctctgctgtggtatgaagctctactggtttgcttgcaggcttacccagatgccacaatgcacagacaactcctggctccggtggaaggaaggatggcagagacattgaatcaggtagggagagctccccttgtgctgtgcactagctatgggttttgcatccccactgtgctccaggcttgatttggggacacttcctcctaaatcactgcattagtcagctaaggctgccataataaaataccatagcctgactggtggcttaaataacagaaatatattgcctcatgtttctgcaggctagaagtccaaggtcagggttccagcatggttgggttctggtgagagctctcttgctagctggcagatggccactttcccgccgtgtcctcacatgggatggagagagagataccaagctccctggtatctcttcttattagggaactaattccatcatgaggactctaccctcatgagctcatctaaacctaattgtctcccaaaggctccgtcttcaaatgccatcacattggggttagggcctgaacatatggatttggagagggaacacaattaagtccatagcaatcactttcatggaaatcctccatccagtgctgctttgcagaacccaactgaagacagaattgacacagcacaggcaagccccaaaactggggattagcccaggagggttttgggaaataattcaaaggtgaggtggaggtgttagacagcagtcttctattcaacattactgctccttgcaaggcagggctaactcataggcagtacactcagagtcagaaatgtatgggctgttggcaactgtatttatacccactaaaacccactttcaattacatgcaaattaagcagcaggttgatgcaaacggaggggctggttatttagaactttctaggacagcagtgataacttctgggtcactgccatggcatttgtaagctgtcctggcactggtgtgagtctcttgcaccagtgagcaatgagggcatccagggttcactttcgtctcatctgctggtttctgctggttttttttttttaacttcatcccatctggaccagatcctgttttggtcagcagggttgtgaccagaaaacaagacctgctggcctcctacctcagaatgaagggtcttttcctgcaaaattgtgaaagatgtagtttgactgcgctgaaggggtctattatgtgagattctgattttgggtacatcctgaaaggtccatcaacacagccactgcgtactcctgggaagattagaaagcagcttgggagctgggcaaacccatgggcaggtttacatggatagggcagagccagtccacatgctcgtgtcatggaggctctgcatgccccctgcttggggaaggaggtaccaagaagctgcccaggccattctgactctaagcagctcctcctgttgcagggcagtgggaactcaggcctatggaatgataagcacaaaggaagacataaatgtagacagtctctgtcaggccagacttatttttttggcaaacacgtgtataatactcactttgttgtagactctgttctgaggacttgaaagatgttaactcttagtctgcacatcagcctattgggggaggtgctgtcatatgcctttttataacatgtggaaacccaggaacaaagaagttgggtaatgtgtccaaggtcacagccacagaaagcagtagatttggggctcaaatacaggcaactgggctccagggtctaggcacttagggggctcattaaaaagcagcaatccccagtaccaactctgtggaccctgctgtagtgggtctggggtgcgcatctgagcctctgacttgaggtcctgggatcctgttttgtgaaacccattggtgagcctggacgtctcctgctgtggttgtcagagtggatgacagacagggctgtgaacactgtggcctgaggaagtgagcccagactgtgtctggatgtagagtcactgtctggggtttccccaatgttgcttcctctggttcctgtcacagtccccaggtgggagctccagctctgtgccccagtgacagccccaaaggtgctgtaggcttggccccttctcactcccactccttagccctgcagaatgggtgctgcctggcacctgcttcaagacaacacagacatcttctccgggcctagaagctttgcctaaaagcaggcaagccaggctcctgcagaagggggctgtgtacccacagactcagggctgcagggcccttccccaggtcctgactgctggtgaggaagatgaaggatgagctgcggggaaatttccatgtgtctctcccgagccgactgtaacctccctgagggccaggctgtgtcattactggtgcatgacacaggggtcactgaagaagcaatgaaagaaccattttcactataacccaatgtggtagatgaatccaaaaatggaggctcagacaagttgctccaatggtaaaggcacgagggacagagccagaaatggggcacagagtggccgactacagacgggcccacctgatcattaagcagggtcagggaagtctcctctctgagccttaatttctcatctacaaaggagagttggggcagctctgctacactctcgggtgaagctctgtgcagaccagatcatgtctctacagaaaacgtagcatgtggtgatcatcacgtagtatccagcttacccattttcacatttgcgcacacacacgtgaacgcatgcacatgcacacataccgctcatgccaagtggactgtgtggacagtatcgcaggtcctgcctggctgagcaggagagggacgtgttccagccgcgggcccccctcctccctctgcggggcagggaggcagctttattcaatggaagctcgaagctctgcttggtggtgtgagaggagggaacaccagattagagggccctgttctttccttgtgagccctctaacttggatggtggtgtatgatgaattattgatctgatgaggcctccaaagttgctgaatcagggtgcagacatccactgctctgctgtcagcctgggggttttgaagttgaatccacccagcacagcccccactgcagattctgttttgctctgcacacaccaggtctgtcgctaattatctattcagcttcactgcaaggacgtgaaccgactcctaacacgtaggccagagcttgtgtatctgctggttttgccgtaaaaactttctttcctccccctgcccccagctcccccatgccatatggtcagacagtgaccacagtccctgagtaagcagacccagtcaatgggccagatgtgcaggtgagcattcccgcgcttctcgtgggcaccaagcctgacatagcagtagactggggcggggagacagcatttcccactaaacaagggcccaggcagggctcctgagaaccagaggaagctggagacagcttgttgcagtcactgggtggggcggggcggggggcatagttaagagcttggaagcccaggggtcccatcagaatggggacacgcatggggtccctggggccccagagctgccctttccaggccctccccacctcccaccttgggcttgagccccaggattctgactgttttcatgccctacatgagctcaccctctcagaattactatcagcagtgacggattagacaggctcccactaaacccattcctgccaaggtctgtagaactggcgctgggttcagatagcaccctctagaggtattagaaggtaaataggctaaagtccctctcccctcccctcccctccactcccctatttattgaatcactcaggccagaaaagtcttcacagagagatgacttgggtcctgaatgctgagctggagtttgctgggttggagattggcagaggagggctgtctaggattctaggcagacaggaatgagcagatatgaagcctaggaaatgtttctggggtttgtgcagagggtggacctaaggcaggagaggttggggagaggaggagatggtgagaagagggctgtttggagggagaaagccatggcaaccccagagcagggtggcttaatgcgcagagcaggcacctctggctcacgtcacacatcagggtgggtgtcgagccggagcctgcccagggtcctcccactctgtggctctgccaccactcagaactggaaatggggctggaggacagagaaagaacagaggctcttggggaggctttcatggccaggtacgtgtccctgacatccctatttcatcagtcacgtagccacatctagcagagaggcaggaaatgtgatcttgccgggtgaccagaagaacaagaaatgagtttagtgaacttgccactctcgccccaatgagtggagatagggacctatcctcaggcattggccatggggctggaggagaggggacagaactagaaatactgccgagcatttgagaggatggggcaggggagagttggtgatgactctaggtttcaaggttgagcagctgggctgtaggggatgtcctgacttaagtcaggctagagtttcatgaactttggtcattctgtcactactgtcacgcttgtgtttaacccactcactatgatgtatttaatgcatttctgtaaatcagctcacatgttaattagcttttggctttacaatcagctagtgtgaaatcatggatttggcgtgcttgttattgtgttttgaaatatacgataaaatggccattcactcaaataaatatgtgttctgataccatcgaaatcatctaatgatgcaggggtcagtgaacttcctataaagggccagatagtaaatcctgtaggatttgaaggccagttcccacagctcagccctgccattgttccgtgaaagcagccacagatgatacacaaataaacggtcttggccgtgctccagtagaacttaatttacaacaacaggtggtgtgctggattatcccctggcttgtagccggctagcccctgtaacagggggtgcgcactgcacttggcgagcattgagggagggacgtgggaggaggagatgtaggttgtgggcaaaaccacagtggtttccaggatgttgagtctgaggtctctgtggatgtccttgtggagctgtctggttggaattctggctctggatgtgactgtagggagtgtcacagagagagatggtgacggggacatcaccattggttagggatggatgaagccatggcctgagcatgaatggggagactggagggcagtggtttgaggagccacatgggtgagaaaggggtggcaggaagtggtggccgccctttcttgcagggaggctgtgaagtatgagcagattgaaggatagacctgagcacatttgtgggtcgggagaaaggagcccacagcaagaggccaggtaaagatgaagagagaggggacagttgtccaaacgagggccggggggtcatggaaggggaggtgtccagggcacaggacagggaagggcgagcctcaaggaatgaatctgcaagagggtgggagcaggtgggaggtcctcctgggggctcctgtcatactcctggggcggccaccactgtgtcacagttccctctcagactgtaaggtgggatgtctcccctcagcatggctgccacttctggaactgtacgaactcctgtgtcagctgaggacacggggcctgagtgctgttactactgcattgatgtgttcctcgaatcaaacctagagaaatgagctgggtatggaagcacatggcatttaccttctctttcccccacttttccccagaaactccatgttgccaatgtgctggaagatgaccccggctacctacctcacgtctacagcgaggaaggggagtgtggaggggccccatccctcagctctctggccagcttggaacaggagttgcaacctgatttgctggactctttgggttcaaaagcgactccgtttgaggaaatatattcagagtcaggtgttccttcctaaaaaaaaaagtctattttggagaattgaaataattcatggaagggaatcactattcagggatttttcccctttgctcttcttttccctccttaaaagaaaaattaccttctagtcctaggatgaggacacactattagtttgaattaaatgctttgatattctcagatcagccatcttgaaccaaagcaaaaccacaagttacactttcttaaaatttgatttgtcatattttctagagaaacttgaatttaattgtgttattcttagcttccactggcagcctagctttgagggtaaatgaaaatataacccatagattacccagccacttgggaacagcaggtaatactgaagaaaaataaaaatagattttgaaaacgttacttacatttctatgattatgattctgcttccatttaagggaaaacttaggtaaatagagaaattttttctataacatttgtagtcagtatttgaagtgattttttaaaaaataagtattggtccctgttcactttttgattagataaatagataaaatatgttatcttgagaaaaatgattatgctgaaagctttataaacagtatactctttaaaaaatgaagagctgacataatttaacttgtatgtattatgtaagtaaaagagttaggagcctttgaatgagtaagttctgattagattttatctttaaacaaaaccacaaaatttaattggtttttacttgtccacttactgctagtgtcagtttcaggggaagaaatggtttcttttaaaaatcttaataggggacatatgccctaaaaatagtcagttttctagtctgagtaatagataagagactgactaagcaaagtttaaaatgctatttggacactttaatgcacatattggatatctaaaagtctacagccatataaaaattttatataattaatgagcaaatgccgtctctcatgccctaaaataaatcagtagaaacatgtttgctggtgaatcagtgaagcattatgttaaacagtgagttacagctcagagttaaaactttctccttctttttgaagaagctgtgcaaatacttctttttaaggagatctggccttttcctacctggttacctcagtcttcctctgctttgggaagctgaaaaagaagaaaaatcacatttaaagcactggaatgtctgaatgggacgcttgaatgtgtagaacagctgtactgatcctagcatgactcagaggacagtctagggcattttctgggtaattcaggataaaagtatttttttttttaagaaaaatacatgtttttggacaacaaaacaaagtaaacattagtttattcgattgcctccttatacttgcctctttcattctgtcccctgtagatttttaaaaaattatctcattttaaaactttattatttcattttaaataattgacatataataattgtacatatttagggggtacatagtcatgtttcaatacatttacagtgatcagatcagggtggttaacgtaatcattggctcaaacatttttcatttctttgtattggtacggagcattcaatatccatcccccttctagctatctaaaactatgtattattgttaactataggcaacatataatggtatagagtgctagaacgtattcctcctaggaataatttgctgtaattttgtatcctttaataaatctctccctatccctctttccccccacccttcccagctgctgtgtcctctgttctaccttctacttccgagataaacttggttttagcttccacatatgtgtgaggacatgtgattttcaactttctgcagctggcttatttctcttaacataatgtcctccagcttcatccatgttgccataaatgacagaatttttttattttagtggctgaataatatttcattgtgtatatataccatgctttcttcatgcattcatctgcctttggacagctaggttgattccacatcttggctattgtgaatagtggtgtaataaacatgaggtgcagatgtctcttcaaaatacagatttcctttcctctggacaaatgcccagtagtaggatttttgaattatattgtagttctatttgtagagtttttgaggaacctccatactcttctccaaagtgcctgtactaatttacattcctaccaacagcgtatgggttccctttactcagcaacctcaccagcatttgctttcttttctttatttaatttaattaaaaattttgtttgagacaaagtctcactttattgcccaggctggagtgcagtagtgcaatctcagctcactgcaacctctccacttcctgggttgaagcaattctcctgtctcagcctcccaagtagctgggacttcaggcatgagccaccacgcccagttaattttttgtatttttagtagagatggggttttgccatgttggccaggctggtctctatctactgacctcaggtgatccgcccacctcagcctaccaaagtgctgggattaaaggtgtgagccactgcatctggcccagcattggctatttttgactctttgatagtagctatcctaactgggatgagataatacctcattgtgggtttgatgtgccttttcctgaccattcatgatgttaagcagtttttcatatattttttggccattttatgtcttttgagaaacatctgttcagatcatttacccattttaaaattggattctttttattttgctgttgagatatttgagctcctcgtgtattccagataataaccccttattggataaatagtttgcagatattttctcccattttgtacgttaacttttcactctgtagtttcctttgctgtgcagaaaatttttcgtttgatataatcctatttgattatttttgcttttgttgtctatgctttcgaggtcttactcataagtttttttacaagaccaatttcctgaagcattttccctagattttcttccaatagtcttatagttttgggtctcacatttaggtctttgatccactttgagttgatttctgtatagggtgagagaggggagtctagtttcattcttctgcatatagatacctactttccccagcaccatttgttggaaagactatcttttcctcaatgaatgttcgtagtctttttgtcaaaaatcagttggctaaagatatgtgtattaattgcttgagtctgtattctgtttcatttattgatgtgtctgtttttatagtaccatgctgtttcagttattatagttttgtagtatattttgaagtctgatagtgtgatccttgtaactttgtcttttgtgctcagaattgttttggctcttcaggaccttctgtggttccacacaaattttaagatttttttttctatttctgtgaagaatgtcattggtgttttgatagggattgcattgaatctgtagattgctttgcatagtgtgataattttacaacattaattcttctgatccatgggcatgaaatgtctttacatttgtttatatcctctgatttttcatcagtattttgtaatctttttttgtagagggttttcacttccatggttaaacttattctttgatattttagttttttgtagttattgtaaaagggattgctgtcttgatttttcagctagtttgttgttcatgtatagaaatgctactgatttatgtatgttgatttttgtctccagcaactttgctgaatttatttatcagttctaagagtttttggtagcatctttaggtttttctatatatgagattatgtcatctgcaaacagggacaatttgacttcctcctttctaatttgaattccctttttttcttcctcttgtcttattgctctggctaggacattcagtattatgttgaatacaagaagagagagtgggcacccttgtcttgttccagtccttaggggaatagtttccaacttttcctcatttagtatgatgttagctgtgggtgtgtcatatatagccttaatttgttgaggcactttccttttatacctaattttttggtataaaagatttctcatgaaaggatactgaattttatcagaggctttttctgcatccgttgagataatcatatggtttttgtccttcattttgttgatgtgatgtatcatgtgtactgatttgggtatatgaaagccttgcattcctgggataaattccacttgaccatgatcttttatctttttaatatatttttggatttggtttgctaatatttttgttgagggttttaacatctatgttcattggtgatattggcctgtagttttctttttctgtgtgtctttgtatggctttggaatgagagttatgctggcctcatagagtaagaaaggaagagctatctctacttgttttgtggaattgtctgagaaaagttggtattaatacttctttaaagtttggcagaattcagtagtgaaaccatccggccctgaactttcttttcttgagataatttttattattgattcaatcttattacttgttattggtcaattgaggttttctatttctttttggatcaatcttagtaggttgtatgtgttcaggaatttatccattgcctctaggttttcaaatttaccggcatatagttgttcacagtaattaataattctttgtatttctgtggtctctattgtgacatctcaattttttgtttcaattttatttacttgaatcttttctcttgttttcttagtctagctaatggtttgttgatttcatttattttttcaaaaaatcaactttttgtttcattaaccttttgtattgtttttctggtctcgattttgtttatttgtgctctgatctttattatttctttccttctactaattttgggtttcatttcttcttgaatttctagttccttaagatacattattaaattgctcatttgaaatatttctagttgtttaatgtagtcatttgttactttaaacttgcctcttactactgtttttgctatgttccatagattttggtgtgctgtgtttcctacttttatttgcctcaaggaattttaaaatctcattcttaattgattttctcactccttggtcatcaggagcatgtagcttaatttccatgtatttgtatagttttgagtgttcatcttgttcttgatttttagttttattctcttgtggtcagataagatactttatataattttgatttttaaaaactttttgaagcttgttttgtatcctaacatatggcctctcctggagaaagttacatgtgctgatgaaaaaaatgtgtattccgtagctgttgagtgaaatgttctgtaaagtctactaggtctatttggtaggttcagtttaaatctgatgtttccttgttgattttatatctaaataatctgtccagtgctgagagtgagatgttgaagtccccaactattattgtattggggcttatttctgcctttagatctaataatatttgctttatagatctagtggttcagtgttgggtgcatgtttatttataattggtatattctcttgctgacctgttccccttattattatttaatgtttttcttgtctctttttacagcatttgactttaaagtctgctttgtctgatataagtatagctactccagctcacttttagtttctgtctgtgtggaatatcttttccaccccttcatgttcagtctatgtgtgtctttacaggtgatgtgagtttcttgaaggcagcatatagttgggttattttaaaattcatccagccagtctttatcttttaaatgaggaatataatctgattcaaggttattatggataagtgagggcttactcctgtcattttattgatttattgattgccatgttgttattttgtatatcctctgtttcttacttcctctcttactgccttttttttttttttttttttttttttttttttttgcagttgggtggtttcctgtagtgatgagcttttattactttttttcccctttgtttttggcttttccagtgagttttatagttttgcatgttttcatgattgtggttattttcttttcacttctagatgtaaaactcccctgagcatttcttgtaagatcagaatagttgtgatgaattctcttaacttttgcttgtctgtgaaagattttactttttcatttctgaaggatagctttgcttggtataatattatagtctggcaagttttgttttgtttacagtacttcgaatatatcatccaattctctcctggcttgtaaggtttctgctgagaaatccgcagtctaatggggattccattatatgtgacttgatgcttttcctttgctgtttttaaaattattcctttgcctttaacttttgacaatttgactataatgtgacttggagagaatctatttggagtgaatctatttggagttctttgagcttcctggatctgagtgcctatctgttcaacaggaattgggatgtttccaggtattattccataaaatatatttcatacaccttttccattctcttctccttctggaacactcataatgtgaatatttgtcacttaatggtgtcccataaatcctgtagtctttcttcattctttttttgtctgcctgttatttcaaaagacttgtcttcaagttcagaaatttattattctgcttggtcttgtccattgttgaaactctcaattatattgtttaatttcattcactgaattcttccattccagaatttccacttgatcctttttaattatatctacctttttgttgaatttcatgtacatatcagaaattgctccttgattttgttgaattgtctatttgtattctcttatatctcactgaatttccttaagattattattttgaattcttttactggaattttgtgtgtttccttataattggggtctgttactagagaattattatgttcctttggaggtgtcatgtttccttgcctgttttgtgtttaatgtgtccctgcattgatttatacatatctggtgaaacagtcacctcttctaattttatggagtaggtttcatatggaaaaacttattcatatagatgggttttggggtgttggtttgatggggtgcattggctttgattctaagtggacacagtagtgtagtctctatgtagtgtcttcaactataatccatgctagtgatgtttgtctcagtggcctgggctgagagagtttatggcagtggtggtgcagctttgctagaggtgggctcattggtttgtttcttaggtcaggggcatatgtgtgcacacagtgggtgagccaacttgtggtctggctttctggagttgggaccgtgggattattactctggctgggggcacagacacacaattgcttggctgacctgggatcatgcctgccaggggcatcatatggggctatttctcaggcctgggacagggacacaaggcctcttggccagcctggaaggtatcttcctgcagcagcccacagggctatttttctggcctgagatgggggcacatggtttctcggctggcctggggatgtatcagctgcttagtgcctcagggacctctcccacttggggtagggcatgcagtggtttggctggcttaagagtgggttcaccctgggcaggactgcaaggccgtttgtcccactggaaatgtgggcggtgaagggtgggtttcttttttgggctcatcctgagtcacagctaactctgggcctggaatctacacagctggggttgtgacattcagacactcatgtgggcttggtggaatgaatatggagcgctggtgctgtagaggtacagttgcgactgatctccagagcataacacactccagagtgtggctctggtctcagaatggtgctgtcctgcagtagcttggctcacagtgggtgggtatgtgtgggtgagagcttggctcacaatgtggggggtaagcaccttgtgctactaatctggaacaatgcagttcagtgaaatccttgcagctctccaaactgggctcagggctttgtgaggactgtgggagtcttgtatgtaaggactgtaggtgtttgcagtggcaatagggactgttagtgatcttctgcttacctttttcctgaaatggaaagtccctcctgtctctgggctgatcagatccaggcaggggagatggggtgcagatgcacggtgcctctacactgccctcctgggcttctagccgtcacaggtacttctccattcctctgctgcatgacagcattctcttttcaacactccagttaaagcttagttatttatttgttgccatgattctttcttcgtgggggtctgggagagcaccagacatctctagtcagccatcttgctgatgtcactcccagaaacatatacttctgagtctgaattgttggtaagggcaataggtggttattagaccttctagatttgccttactaccatgagtcaaatatagcacactgtctgttcttataaataaagctttgttggcacacaaccatgctcatttgtttaggtattatctatggctccctttgtgttccagcagcagagctgagtaattgcaacagagaccccacagcccacaaagccttcatatttactttctggctcttcatagaaaaagtgtgcttgactccttctctggggaattctatttggaacctctacatcatatcagacatcttaagatgtattcataccttacattaaaaatgaacacattgccatacaaattttgaaaggttttaaataaatttgcttttgactatgggtaacttatttagcttactactggctacaaaatgtcagcagttttgcttatttgtgaattcctgcattatgagatgctctctgacaaattgttttcaatagtaataaaatattcatgcaatactcatgaacaacaaatttaacaattaatgaggtaacaaaatatcatgttttatagatatttagttagacatttatgaatttttagtttgctgtcttctttgtgtattttgaagccgatatccttatctgtacacacacacacacacacacacacacacacacacacacacacacacacatatatatatatatatatatcctgactattttcataggcctttcggtcttggaattatagtgtccagtgaagaaaatggtcatgttggcatctttatgaagtacccctggcataggatatttcagcctttccctttacatgcaagtctatattatatattatcaccttccccaactgatgtctgcaggagacattcctggatgtctgctggtcctcctcccaagttcattctcaagtctacctacatgcttaaagaaagcatccattagaaatatcagcaccaggaggttttggtgaaaattcctagcttgtaatggaattcacatatactcatgaattaaactaattcttgctaacggcaatgaataaggcaataaacagaaatagtaaatattttcagagaaaatgtgattttattatgaacattagcctccaaattacccagcagtccaaagatagcggcagtctgagaagttaaatatttattttgcatttcatcaattttggtttttatgtgcaataacaatctgattggttttgtggagcttttcatctaagatgttcattgtgcttacttttatgatttactaaacacagcagatacctcagttgttaaaactttccttttcccaagtgaaacactgaccgaggagacctcattgtatgtttctgtgaagtaggcatagcaacggtcccctcaaagatgacctgtggcagccgtcaaggatatcaagacagtgccaaatagagggcgtttctaagatggtttcctctcatcagagagtttttctgtgtggcagagactgcaacccttgtctagtcattgtcttctctgaaatttgtgtgtcaaaggccaaacaaatctgctatgaagaaggagaaggataaagaattctggagccatgaaaacagtcctttcactgttcccaacacaagcattctactgctgaaattttgtgcaagtatgaggctgcagagactgctgattgccctaaaacatgttacctcttcttccccagtaaaagaaccctgattcttgctgtgcacttgccaggcagaatggcagcaacatttcccatcctccacttcagctaggcatggctatgtgactaaattctggccaatgggaggcaacttccaggaagtgtccttgaagagggtggagatgtgtctgtttccctcttcttctactggctggaattagaatgtgatggctggaggtggggcagccattctggtcactgccgtcagagctgatacacagtgtagtgcaggatagaagaggcagaggtgcctgtgcaccagggagccctactccactcctgaaccaccttcctctagactcaaagtgaggaagaattaaatgtgtcttgtttaagccattgctcttttggattttctgtcattcatggccaggtctaatcttaactgatacaaaatagagaccaagagaagtgagctacaagtagcagaaccgaagcacgtggccttggcttaatggatgtgttcaggcggcaggggctcaaatattgtgagctagagagccagtgacccttgttatacagaaacaaagcatttgataaaaaccactgcccattgttttttgaaaagcagcccatgtcctgaataaggactgaggcaggaaatggcaggagaaatttataatgttaaaaaaaaaaaagcattagctgcttatcactgcttttagcaatgttctacaagagagagctggactttggctactgctggccagtacctgagcaagaatgaaaggaaacacagtgtgctaatggaggcactctacctgcagtctgcaatttaagttgactgagagcttggtaatttggagccttgcagggttgaaaaaacaactgctgtgtttcacaaactatatcagtcgtagaaatggtttctgcaaagcagcctgcttagcagaaaataaaactagtgccccatcctgccaatttggaaccttgtgtcaaaagtcatttgaagggttttgtcttcccagctaagcccttccttcccatggctccaggtgggtaccattatgctgacagagggagagagagagagagagagagagagagaaatatcagcagagcatggaggcccataaggaaaaaccagaagtttcagcattaaaaacgtgtcttcacagaagagctcaccggaaacaagtagatctgaagtctttatgtttttgaaaaactgttttaccaaagaaaccagcagtttggtctgtctgcaaaagcttgtgattgtttaaccccaaagtgattcctctggggggttggaacaaccaaccttcaaagcaagaagcaaactgtgaacgctgtgtagcctcaggaagggcataccctttgccccccacactgggtacggcaggggagataatagtagggaagagcctctgagaacacaaggccatggccatggcgggtgatgctacagaaggagactccactcttcctgcccactgggatttgctcacgtgtgtagatgatgatggctgtgtttatcagcctccaactaccaagtgatagttttagtcacagctcttctgttcttactcatctcccttatgttggatgtattgagagcaagtaacttattacttagtttgtagtttgtcaaaccattaaaatcctcattcatatctcagagaaaggactgtgctttaccctgggttgccagatctagagtcagatgcagtgattggatggaattttgcagatgtatctcttgggggcaagagatgagcatgttctgtgtatgggaagaaaggctcacacaggtctgtgggtggccaaaggagtggactgtagcagaaactactatctccccacccactcccatgatctcttctttccttattcttaagaaataaaaccctgaatttagccagggctatggctttcccaaatgtacaatgcatttctcagacttccttgacctagctgtgaccaggtgactaagttctggccaatgggattcatgtagtggcagcagaggtggtcgtgcaagttctgaagggtcctgcagagagcaggtgcgccctcctctgcctctcctccctctccctgcaggctggctgccgacctgaagggggactatctgcagagcttgggaagggaggcatccacagtggaatcctgtgttggaaggagccagagtccctcacactggcaggccaaaaaggcctggatccccaaacttttacaaaagagaaataaatgtaagtcagcatttgtgggggcactgtgttctgtcattcatcgtcgaacttaatactaagtagccccagtaatgtggcctaaaaaacaaaccaataaatagaaaaccactgatgcataaacgtgtgctatgctttagagtgattgcctcgatgagttaaatgcattcagtgaacagatttttcccattatgtttaaacaagtatatgtacaatgagtgagtttcctccttacaccgtgctacactattgcttaacagattcctaaaattctcttccaaaatgcctgtcactgccccatggcatatccttttaaatatccctttccactgacctcacaatgtcacagtgtccttttgagcttggatttgatttttggaaactgccagaagtcctccagggccttcggggtaagcaggtgggtgatcagcctcagcgacacccttctgggctgggagcaggtgtggtgaagggcagatgaactcgttacctgaggcacaaggccattcattcccacatgggcctgtagagggtttgagcccttgggcatacctgttttaaatgtttttaaaaacttcctctctcagcccaactgagaggagtattaagcagtggggtaagtgtgtacctagatcgccaaccctgggctggcactgccagtttccccagcacctagactgccaagcactgactccagctaacactgtcctttatcaaaacacccttaaaccaagagtctgaaaatacaataaaggtgattaggagctgcttgcccctgatcaaaatgaacccggcgtagtgttgaatgctttcaatctaccgaaatggaccttatgtgctggacactatttcatttatgtggaatctgtggtgttagctttctcagagcccagagccaggcaccaggcctcactgggatgcatggcccgaaaaaggcttcattctgacttagaatctagtaggaggtgaagtcccacaaagtgactgttgccttaacccgctctgggaagtctgtgtttgctctggggtttatcgtttgtttccctatggggagcagaatggtgaagacatcctcccaagattcctgaggcctttcaactcatactctaatctggcattactgtgaaggaatttgcagaggggattaaggtgaataaccagctgattgtaaaatagggcattgatcttgcatcttgtgtgtgggcccagtgcaattctatgagcccacgagagtggagacagctctctggctggagttagagagagagagagagagagagagagagagagagagggagaagaggaggcagaagggaggtgaggcagaagggacttcacagagaccggaagcaagaaaagcactcaccctgccattagtggctttgaagggggccacaagccaaggaatgtggatggcctccaggatctgagcatcccctcaccccactggtgattgccagcaaggacacaagaacctcagtcccacaaacaaggacctgcatttggtcaagaacctgagagcgcttgggcatgcattctcccccagagcctgtaggaaggagtgcagcctggctgatgccttgactttggctctgtgaaactcagggcagagaacaagctgaactgcactgtgcccacacttctgacctacagaccctgtagggtaaatttatgctgcttttaagcagggaattttctggtaatctgtatgacatcaaaccttagcatgaatgtaaacttccacagggaagctttgtcaaggcatctccagtgcctggaacagtgtctggaacagcataagtgctcattaagtgctcactgagtgaatgagtgatatggcgactattggtatgcggctcctgcaagaaggctggagaagacacgaggggccacagcagcaaatggagccaggacagcgtgtatgtgtgtgtgttgaggggcatgcggagggtaggggcagtaggtggtcacttagctctctggggacagggttatggtcttgggcagaggagaagtagtgctgatgtgatcacaagactctgattctgtcccctcagccagtaggggcctcaaggtcactgcttgtatatggctcaggtgaaaaagaaggacagtggtgggagggtgatggtcatagggtcacatttgaatctctgttgtttttttccctcgatatagaaaagttgaaagaattgtacaatgaagtcatgcatacctatcatctagattctgtagttaacatttgctatatttgctttaacacacatcaatgcatctttccatccctcttttttcttttcttcctcttcctcctcctcttcctctatatcctctttcttcttctttcatcctattcttcgatgtgtttcaaagtaagttgcagacatcagtatactttacccctaaatactttgcctaggtagtgttgagtttgatacttttaaaggtaaaatttacaaatgaaatgcataggtcttaacttcaccattccatgagttttgacgaacgcactcaactgtgtaacccacatcccagagaggtatagactattgctggccgacagcaggatctgcagtgatgaaaatggtcggtgctgcccagcacagcagccaccatgggtggtccctgagtactggaaatgtgtctaccaagctggaagacctgaatttttgattttatttaattttaaataatttaagtttatattctatgtgggtgacctgctaccttttaaaattgaaattttggttggaataatgatagattcacatgcatttgtaacagataatacaaagaggtctcatacccttcactcggttttctctcagggtaacatctgaccagacaactggacagtatcacaaccaggacactgatattgaaatgctccacctaccttactcatgcttcttggtttcacctgtgctcttctgtgtatgcattaagttctgcactgttttgccacctgggtaggtctgtgtaatcatcaccactgactgatgctgaacaaggtgctgagcagggcagcacccccaggacctccaggctgctccagtataaccacacctgttctcctcttcccactcactcttgcaaccactggtgaccatcagctttaaacatttttaaaatgttttcacttatgtaatgtgatataaatgggattatacagtatgtaatcctttgagattgggttcttttgatctgccacgtttttaaaagcctgtcttccccactgggactgcaggctccttgagggaaggaactggttgtggctgaatccccagggcctgacatgtagtaggcactctatgtttattgatttagcgagaggcaatccaaataaaaaagcatttacgtgccagtccctgtgatgcagagggggcagtggagggagagaaaagcttgcagaaggagatgattcaaaacgctgagcagggagttcataggcaggagacattcagagggacacagcatgggcaacagctgggaggcagggctgatcaggaggctgcagcctggcctgtgaggatagcgtgtcttaggctgacatggcaagtgaggttgtggagacatctgaaccctggtacactgctgattggaatgtaaaatggtactgctgctgtgacaaataatatggatattccttaaagaattaaaaatggaactacagtaggattcagcaatcccatttctgaggatatattcaaagaatagaaatccggatctcaaacaggtatctgcactctcacgttcgctgcagcgttattcacggtccccatggtgtggaaaaaacctcaatgtccacagataaatgaacaagtaaagagacgcgatatagacacacaaggggatgctattcagccttccaaaaagaggaaatcctactatttgcaacaacatggataggtctggaagacattctattaagtgaaataagggggacacagagggatgaggattggaaggtttcaccgatgtgagtgatcaaaaagagtcagatgaaaatgcagaagatagaatggtagtttccaggagatggggtgggggagatggggatctgtttgtcaacgggtataaagttacagttacatgagaggaatcagtcctagaggtctgctgcacaacgtggcacctatagtcaacaacgtagcacctatagtcaacaacgtagcatctatagtcaacaacatagcacctatagtcaacaacgtagcacctatagtcaacaacgtagcatctatagtcaacaacgtagcacctatagtcaacaacgtagcacctatagtcaacaacatagcacctatagtcaacaacgtagcatctatagtcaacaatgcacttcaacattttactttaagtgctaggatacatgtgcagaaggtgcaggtttgttacataggtatacatatgccatggtggtttgctgtacctatcaacccgtcatctaggttttaagccctgcatgcattaggtatttgtcctaatgccctccttccccttgcctcccaccccgcaacaggccccagtgtgtgatgttcccctccctgcgtccatgtgttctcattgctcgactcccagttatgagtgagaacatgtggtgtttggttttctgttcctgcattagtttgctgagaatgatggcttccagcttcatccacatccccgcaaaggacatgaactcattcttttttacggctgcatagtattccacggtgtatatgtgcacatttaaacatttcttaagagggtaggtctcatgtcaagtgtccttaccaccaaaaataaataaatgaataaatgaataaataaataaataatatataaaagcaaaggaacacatggtcactgagagacaagagattcagtcttcactgaggttgaaaaacaaggaagggagaaagaaagtgaactggggatcccttctgccaccttcccccacaacccctggttttattgaggtataactgatatgttaatataaaaaaagacatatattgaatatctacaatctgatatgatagtataccatcaccagaatcaagttttgtggagctctgctacctttttgctgggtgacttccccagtctgggcctgtgtctatttgaaaaattgaggattcattttgactggagggttttccacctgagttctccagagcctcagcattccaggacatcagggtgatttgaagtcaatcacagcagagaaactttggtctgttggtgttttaagtatctgggtttttttttgtttgcttttttttgttttgttttgtttttgtttttttcagtatcccttcaccttcttctaggaaaacatctggacttcctttgggtagttccccatctcttcatcctctgtttctgtaagttccagaggcagatcctggaagattttaactagctaatgtagcccaccccgttggccaccactattagttcagagatgtgcattttacccaaactgagccagtgagagtggggcccagggtctttccaactctttggatggactttgaagctgagaggctgtaagtgcaggggcagttgcagcaaccttgagaacatgaggggaagaggcagagtggttgggggccaccagatgtgggaagcatggaagtgagctgagagggagtggagtgggttctaatgacattgcttaagtcctgcacctagttaagaagccatgactccccttggacaattacctgcaccagtgaattcacttttgtgcttgattcaagtttttggaaaccagcccggagtgaaaacatttccttcaaaagtttttgtttttcaaagtgaaagcaagtttattaagaaggtaaaggaataaaagaatggctactccatagacaaagcagcctcgagggctgctggttgcacatttttatggttatttcttgatgatatgctaaacaaggggtgggttattcatgcttcccctttttaggccatgtaggataacttcctgatgttgccatggcatttgtaaactgtcatggtgctggcgggaatgtagcagtggggatgaactggaagtccagctttccaggagaaccttctaatgagcacctcttacctgctttgtgtagtctaaagagagaaatcgcttcagcctcagcaggggctgcatcatcccccagggaagagccacagctgggcgaggattgccacaagacatttacaaggagatgatgccacggagactaacgcagactggtaaacggaaacacggggctttggctcgaacaccctctttcaagaaagttgtttatgaccacaaggaaggtttgagtctctatatttttgcatgtactagatttctccttttaaaaaagattcagttatgaattcaggcgttcaagttaatccttgagaattaaatcaattgaattaattatttgtaaaaacatcctcagtttcttcagatgaaaggagtatgatcttcacagaattctgcttgtaattcccagagcagttgatgtattttgttgtattttgctgattggctttgtgtgatgtgcaaagttctttacagagaggctgggagagagttggggggccaaaggtgagagggctgtgttcttcccacgctggctcacagcctcttgggagtttatcatggagctgggtggcggccactgtcttcactttcccagtttctggttttgttttttaaagttttcatcctcccactttggaagcctatggacttcatctgtcatgcgatttgtaaatcaagaccccaacaggcagctgtctgcttctattagctttcatgacacaggtgacactgcatggaaggcctgcctctttctttaagtcagttattaatatgaaatgacaccaagttgtttctcaaaagccaaacagcctaagaatagtaaagaaaaatcataatctcacagtattataattcaataactatcattattaaaatggtggcataaagcccaagctttgcaatgtgtgggggaagttgagtgagaaattcaccctgaaattcatctgtgtatcagtcggagaaattaatgctggcagctgaaacaggtaaaaccaccaaggcttttaacccaatgaaggtttatttatcatcaggcaaagtccagtaagtgcacaatttgggcctgtaggttggctgtggcaggggaaaagatgaagaaagcacagtggctattaaattctattggccagaactagtcctgtgaccatgatctatttgccagggagacgaggaggtgagaatgaacacatagatactgaatgcatgtggttcctctagcaatgtaaggcggatttctactgttgttagtcagaaatgaaactcaaaactcatttagatgatggaattacgaagaacttgaatgtgggcctaacataaatcatgctgctataaagacacatgcacacgtatgtttattgcggcattattcacaatagcaaagacttggaaccaacccaaatatccaacaatgatagactggattaagaaaatgtggcacatatacaccatggaatactattcagccataaaaaagggtgagttcatgtcctttgtagggacatggatgaaattggaaatcatcattctcagtaaactatcgcaagaacaaaaaaccaaacaccgcatgttctcactcataggtgggaattgaacaatgagaacacatggacacaggaaggggaatatcacactctggggactgtggtggggtggggggaggggggagggatagcattgggagatgtacctaatgctagatgacgagttagtgggtgcagcgcaccagcatggcacatgtatacatatgtaactaacctgcacaatgtgcacatgtaccctaaaacttaaagtataataataaaaaaaaaagaatcacatttccaatcctggtgtctcatagaggatcaaaaaacagtgtatgaaagacgcatgatgtgggcatttagagcattggctttggtttgggaggaagccagggcttaacaccagctctattattcaccttgtgtgagcttgattaagtgtattcaacactttgagtccttattgctttgtcggtaaaatggggaaaatagtaacacccctcttacaggttttttgagaagtcattgctattactcttaccaccatcactgccccgggaacttgtctttgtaataagatttttggtggatctgaagctgtgggttattgtttaacctccttcgtgtacacaggctgccttccttcatgcatacatgcacgtggcaaatacttatcaaatgcttagtgaatgctaagcctgtgttaccattttgcctacgttatttaattctcactttctgttttcaccccattttgcagatgaggagaacaaggctgggagaaagcaaaggagccacttgtttaaggttatgcagctgagaaatgaacaaggtggggttcgagtccagagtgcgcattccccatcaccccttaacaaaaaggcatgtttcccaggagactacagaggagaatcggcaggtggtcacaattgcagggctgtctcaggctgagcagagagtacggtggaggggcatgggcctgctgttggcggtgagggccttggaaatggcttcctggaggagatggcaattatccaggtagacaagatgtgtgtgtgtgtgtgtgtgtgtgtgtgtgtgatcatgaagaagaaataatgtgcaaagccctggtcataaataacttttcctctgcaaactgtggatggcagttcaccatgtttctcaccactggcctggtcactgcttatccaatatgcatgtaagaattactttttctcttttttcccttctataaattctcatagaacttcctttaatgcattaaaaaagcaactagcatgttcaacccatgatatcatatatcctatgttttaggatgcaactaaagtgaatatataggtgaagagggtgaatcagtgcagccggcagcacagggaaaaccaggaactgtcaatatagcaaaggtgggaagcccagggagctgaagcttcaggaaccctgggacagagagtgtctccctgcattccagcttagaagtgctgctcttcaagacagagtgtcaccagctccatttgtccataaagccacattgttcgaagggaaggcaatgtccctctgccactgctcaccatgaaaagacagtgctgtgtcaggaactgtggggccagagctttgtgctctgggggaagggtcatgaggcaaaaggtcacaagagtagccaggaaagttctaaattagccttgggaacaagccaggcccagagcagagacccagagttcaggaatgttccctggccctgcccttgaagtctctgctcatagcctcggagccgtggctaccagggagggtggctaaaaataccttggtcaggggcctagagattgcacttaggagactgctttccagaggcagcccggggagagccgacagcagtgtgggcgccagggcccccaccagctacaaaggtcagccagcccccagctgccttcaggtgggtgtttctgccagttctcctttagtgttcaggctcaaatgaaaggccactttcagcaagttttcctgacattgtcggagactggagccaaggccctgtctgttttactttctgaaagagccagtctgagagatggatgggttggcgactgaacaccacaaacaacagcagtgggctttaacctgatggtggaggctccggcacaggtggggaaggccagtggctcagaaggcctgacaaggacaggaccaaagctccaacagctcagagctggactccttcccatcccagatctgagctctttggttctccttcacagaggtgattatggttcatagtatcttctaaatagaaatgcatatcatttaaaatttttaataccaatgtgtaaactgaaccacactttaatttattcacctaacaatccacctaagagatcctgccctgtcaacataggtatagttattgcactttttagagtttttatgtcattgtttgtacgactgtgttataacttaagcagttttctgctgagaatattcaggctatttctggctttttgctacaacaaacagtcctgctgagaacattctaattcacactttttctatgcatgcatgaacatattgttaggatacagtcctagcagtgaaattcctagaggaatgggaacatacgtttacaatgttaatacctattgacaaattgttttccaacattcccaccagcagtgtgtattatcagtttttaaatatttaccagcctaagtaaaataacttaaaaagggtctgtaattttagtcttaacctccataactttcattataaatgaagctggaacatatgaaattatgtttatgagccacttattttcctgtgaactgcctgtttttgtcatttacccatttttttttttctgataggttggtggtcctttttatttatttgtaggaatgctttgtatgtggtatggtttggctgtgtgccctcattcaaatctcatctcgaattgtgatcccacatgttgagggagggaggtgattggatcacggggggcggttcccccatgctgttcttatgataatgagtgagttctcacgagacctggtggttttatttggggctcttccccactttactttctcttctctctctcctgccaccttgtgaagaagagcatgtttgcttcccctttcgccatgattgtaagtttcccgaggcctccccagccctacagactgtgaatcaattaaacctcttttgtttataaattacccagtctcagggaagttcttgaaagcagtgtgaaaacaggctaatacagtatatgaggatattagctctgtttgttatctatgttacctttttttcagtttgtcctttggtttttgatatctttttccatgcaaaaactaaaaaaaaaaaaaaaaaaaaaaaaaaaagatgaagtcaaatgtatcactcttctttatggctttaagaggacactgatttctgaatggtgagaaaaggaggtgacaagaaacttctgcaccttcctgcaccaaaccagacttgaccctggaacacagcaatctgacctggctgcgtgtttcatgtgtggtgggttgatggcccatctctcatcctggtcactgtcacctctgtttcctacctgcttagcctttaagctgcgaagtcatcctggacatgcatcacctccccaaactctgtcttgtccccattgccacccttcccccagcctctggacaaatctccctgcttcagtgtctctcatctgttgggtacaaacatccccagaagatcccccgccacacattccctggatcagaacccatcagtggttccctagtgcctgggaatttccattcaatggcctccgaaccatgagcctgccttttctgcctgaagcccaaaaccccagctacagatctttaccccagagaccatcttgggcctccctccaggcttttgcttactctgtgccctcatcctggagtcctgtccccacccctatctacagaaactccaccagccctcctggctgccccgatggtcctcgcacagggagacttgtctacctcccgaggtcacgtgtgggctctggtcctcttgccatcatggcagagattttgctgtatctccccctggctgctggtgctctgcttacctcctccagagttgttaacaaagagctgaggatgctgagctgcccagggacttggctgcaggtggcatagggagcagcaagggctggccagcccatgagctacacgcccgagtcagctgcctcctctgggtaatgaagtggaaacgttgctctccacctgccacctccaggggctttcttgctctctcaagtgattctaaccactggtcattcttagttaccaaccacagctccaacactgggcaccagggatgctgaagggagcaaaaacaatgagcctcccaagaggtgagatggaaattaatctaataactacacagaaaaaaatgcaatcataactacattcagtgccacacaaaaggtttgtgaatcaggagagtgtatctccaggggtctgacgtagtctgggggttggggaagccccacaaatgcccgagctgcctgtgagtatgaacagcgaactggagggggcagtgtcccagtggagggacagcaggagggagcctggtgcacccgtgactcacacggctggggagagggctgaggaagctccagcattcctgcttcccctgatcttgcccttcagagggtttgaggctgaaccagtccctctttgagggaagaaagggaagatgtgtcccctgcctgacaattgacaaacagagcacattcctttcttggttccaatgtcatttgcttgagaacaaatggaccaaggagaggtggcagagcagggatcctccagcagtgagttgtgctggccctggctggtgtttcaggatagggtcctggtgaaaggtgacagaggtacagccattgaaccacaggctcctctcccgatggtgatcctcaaaagggaggctgctcccaggtggggtgccagctgcaagggagcctgagagcataggcgaacactggaaacagaacatctggggattcttctgtgccttgactttctgtattcttaatatctcgatggcagagaaatctgagatcaaggctaaatatttgcctctgcttcggattttgattccactagaaagacagttgaaataatgtacatttcagcttccgatgaaatagccagcaatggaggatctgtgtttgtttgcgaagtttactcacccaataaatcattcctttgcagagatgccattaactaacaattcaaggttggtaacctccaatcaacagtgattaaagaactttcgctgaatggcagagagagaacacgtttttctgaacgctagcagcagtcggcttgcaccatccatcttttctttgataaactgctctggactaataattccagatggaaagattttaaatcaagtacggaggttggcaggatcagggaaaactctgaataattgtaaagactattttattgcagactcttttcagatgggagacagtcacctaggttctcaagagtggatggtgtttccaggaggggtatttcctcctcacctcttattcatactctgtgggcactccacgcccatcgcatgagagtttaactgtgaagtgtggatttcacatgttgcattcctgtcatcattgcccccaggacggaaggccagattctgcacttgacaccctcaagcctatctcttccacactctgcctggaattttgtgtcccaatcatactgaggttttcctggctctttccttctcagccttcaggtgccagcagggatggtcactgggccagatttctcctctgatccctgcagtgcctcacagaaccactggaaaacacactgcctcctggcttgtctgcccctcctctaggctgtaggcgagctcactgggggccagtgatgtgtcttatcttcttctgtagcctccatactcaacacagtgctggtgagaggtgaaaccttcatcaatgtatgttgcactaaagggtgaacgaacacaccccttgatgttttatgctaacaaagggtggttgcaggacagaagtaggtcatgaggggtggaacctaacctaccaggcaccaaagtctctggggagtgtgttaaaatgcagatgctggggtcccacctccagaggctcattcagcaggtctgggctgaggccttgggaatctgtttttctggttttttgtttgtttgttttttgttttttttgtttttttttttttgagatggattctcgctctcttgcccaggctggagtgcagtggtgtaatcagctcactgcaacctccacctcccgggttcaagcaattctcctgccttgtcctcctgagtagctgggattacaggtgcccgccaccacacctggctaatttttgtacttttttagtagagacggggtttcaccatgttggccaggctggtctcgaactcttgacctcaagtgatccacccgcctcagcttcccaaagtgctgggattacaggtgtgagccactgcacctggctggaatctacatttttaacagtcttcacaggtgactggagttcctgctgaaatttgagaacctctgctcttaacctttcttctttgcctctaaaagccatgcctgtgaccttgagccttgtcttacctttctaactctcttgtgttgagggcaatggtgacaagagcctctggactttgaatgctcacaaataaacagtgggaggcatgtgggaagccctagaaggtctggatggccaagggagcctaatttcagatggactatagtgaaaattgcatattcattcattcagtcagcatacatttattgagcatctactatgtgtatcaggaaggaccaggagctagagaaaaaggtaaatagggatgacagagtccacagaaacccgcaatctggtaggctctgggttgtataactcaatgagaaagtgaagaaggtgaaggccttacttcaccacaggcggcaggtgggtgggggggagagtaccccatcgccaaggtctttgtctgaactcactccctgctcagggcaggcaagaatcccctttccagaagtaaggctgtgctgaccaaagttggctgagctgttctgtaacagctgcaaagcccatggtgtgaggggctttctgtctcattgcagcttcattgtggggatccatggggaaatttattatgaggtttagcagacattgctcaggccaccccagacttgcctctcagtttgggcaatctattcaaccaaactgccgggcaaacaattgcacattataattaggagagaccttaggggaggtcttctatgaggggttcatgaacctttgaacaccttgctactcaacgtgtggtcactggaccagcagcaccagcattctccgggaacctgttacaaatgcagaatctgagcccccaccccaggcctgctgcaccagaatctgcaattcaaaaagagaccacgatccccaggtgatacatgtgtacattaaggtttgagacccactggtctattgaatccattgggcaaaatgttttgcattgtctgtgagggatcccagagttctcatgtgattttcacattgacctgtgactacaaaatttaatcgctgctttggagatgtgtgaagtccagggcagtgttgataaaaggttttgcttccctgatcaatccctgtgagtgatttggagctagagatttcttctagggttatacattatgcaagtatggaagatggtgaagaagtctatggaaggctgttgtctccaaacctggtggttggcctgaactcaccatagatcagcagggctgagagtctgagagacaggaagtaggggagaataaggaaaacctggaatgcacaagggacaagaagaacccagatctgtcacaggtgacctgcagaaggaagctgccaggaggctgctctgctcgcgcacctggcccaggactcactggagctggaagagctgcaggcctggcccataatcagcaacaccgagcaggtgcttcaacatcgcccagcccttctgagcctactggatgtgccttcacttctgccttccagttcactacaggtttcttttgtggccaaccttggcctggaaacataaagcagaaagaattctgggaagcacagttccagcttagatattgttgctgcagtacaagttgtcaaactcaaccttctcctgcgctaggtgagtactgtaacgagcggcggggctgggtgaggttgtgagcacctggagagtgaattgctttacctaactgtctgccagaataaatatggacctggagctgccagatctttgaattttttaggataaactagaatttggggatattatgtcaaattccctttttaaaatggtagaaaccaatttgatttttgaaaattattaaccaagaaaaatggttctgatgaaggggtggcctgcccctcacacctgtgggtgtttctcgttgggtgagatgagagactgagaaaagaaagagaaaaagagacaaagtatagaaaaagaaaagtgggcccaggagatcagcgctcagcatacggaggacctgcgccggcaccagtctctgagttccctcagtatttattgatcattatctctaccatctcggagagggggatgtggcaggacaatagggtaatagtggggagagggtcagcaggaaaacatgcgaacaaatgtctctgtgtcataaacaaggttagaaaatgtgctgtgctttgatgtgcacatacataaacatatctggtgcattaaagagctgtattgccgccagcatgtctcacctccagccttaaggcagttttctcctatctcagtagatggaacataccatcgggttttataccaagacattccattgcccagggacgagcaggagacagatgccttcctcttatctcaactgcaaagaggccttccttcctcttttactaatcctcctcagcacagacccttcacaggtgtcgggctgggggatggtcaggtctttcccttcccacgaggccatatttcagactatcacatggggagaaaccttggacaatacctggctttcctaggcagaggtccctgcagccttccgcagtgttttgtgtccctgagtacttgagattagggagtggtgatgacttttaacaagcatactgccttcaagcatcggcttaacaaagcacatcctgcatagccctaaatcctaaaccttgagtcacagcacatgtttctgcaagcacagggttgggggtaaggttacagattaacagcatctcaaggcagaagaatttttcttagtacagaacaaaatggagtctgttatgtctgcttctacatagacacagtaacagtctgatctctctttcttttccccacatctgtaaactagacttttatcatttttattatgcccatttccctcattttatggctgtataaattgaggctcagagagggcaagtggttttccaaacatagaacagcaagtgtaatggctggactggattcagagccacatgccctccaagaaccctttgcacaacctccatctttctactgaggagtttcactaggcctggcccccagcctggagggtagagaagatttatttagctctctcacagacaatgcgaaacatttgcccaattaatttcttaattgctccccttaaggtagtgcttctcgaacttcaatatgcagagaaatcacctggcaatcttataaaaatgtcagattgaactcagcagttctggatgaggcctgggattgagaacgtcttgcatggtcccaggaggtgaggaacactgtcttcaggagctaacagtcccgctgggtcagggagcttccatgcgatgactagagctgcacattaggattacctggagagatttaaaactatcccattgctgggctgcgccagagaccactgacatcagaacacagatgggtgaagcccaagcctcaggatgtttaaagtccctcaagagattccagagtgcagctagggttgagaagcactgaattagggaaagttggtatgaattttttggtgctagagggaagttcaggggtgggagggaggcaggaagggctttctagaagagcagcttctagagtttcccaagggaaggccctagaacggcactgtctgggacaggagctatgagcccccagttgttatgggtcatctgaaactgcattgagcaaaatacacacttgatttggaaaatttggtataaataaaataaggaaaatattttattaatcactttgatattgactatatgttgaaatggtaaaagtttgaatgtattgggataaagtatatcttaaaaattggtttcatggtttccttttgatttttaaaaacgtggctattagaaaccttacaattacatatgtggcttacattttatttctcttgatgatctagaatcttcatcattaataactccttgatgatgcttgtatattcaaaagtctaaacaccactgaggtagtttggaactattgacataacttattgtctgtggtccctggaccggcagcatcagcatcatctggaaattgttagaaataaaaatttatcaggtcccactgaatcagaaatcctgggagtgtggtccagcaatcagtattgtaacaagcccttctggtaatttctgatgcatgctaaagatgaggaaccactggtttacatttgtcaagggggagctatgatcatgccataggcaagctttccctgagtcttttcccggaggggaagagtagcatttccaggcaggcgagcattagagagccaaagggcctggcacctcccatcaaccccatagcaggaatggggcgaactttgattgatgtaagaaaatgaaaatagatttcctttgttgtgtagaaactttttagtttgatgtaatccaatttgtctattttcacttttgtttcttagacttttgagttcttgtccaaaattctttgcccagaacaatgacatggagcatttcccctatggctatgttttcttccagtagttttatagtttcaggtcttacatttaagtcatttaagtctttaatccattttgagttgatttttttgtatggtgagagataggggtctagtttaatttttctgcatgtggatatccagtttccccagcaccatttattgaagaaactgtcctttccccaatgtgttttctgggtgtctttgtggaaaatcagttggttgtaagtgtgtggatttatttccatgttttctatcctgttctattgacctatttttaggtcaataccatgctgttttgcttactatagctttgtattatatcttgaagccagatagtttgatgcctctagctttgttctttttgctaaagattgctttggctatttaacttcttttgttgttccatatgaattttaggatttgtaaaaatttctgtgaagactgttactggtgttgtgataggaattgcattcaatctgtagatcgctttggggagtatgaatattttaacaatattatttattccaaatcatgaacatgggatatttttccatttatgtgtgtcttcctcaattactttcactgatgttttatagttttcattgtagaagtcttccacctccttggttaaatgtattcctaagcagattattttatttttgtagctattataagtgagattgcattcttgatttctctttcagatgttcactattgtgtgtagaaatactactaatttttataggttgattttgtatcctgcaaatttactgaatttattagttttaacagtttttttttttttgatggagtcatcagggctttctatatacacaattatgtcctctgcaaacagggactatttgacttgctcgtttcaaattggaggccccccttttttttcctgtggcctaattgctctggctaggacttccagtgctatgttaaataaaagtggtgaaagtaggcatctttgtcttgttctagatctgagaggataaggaaataatcaacagagtaaagagaccacctacagagtgggaggaaatatttgcaaactatgagactgacaaggagttaatatctacaatacataaggaactcaaacaacttaacagcaaaaagcaaatacagccggccctccctttctgagggtctcacatctgtggattcaaccaaatgtggattgaaaatgtagtatttgtgggacttgaacattggaggattttggcatctgaggggggtcctgaaatcctgagggatgactgtaatagattaataaatgggcaaagatctgagtagacatttcccaaaagaagacatacaaatggccaatcggtacatgaaaaaatgctcagtttcactaatcataagataaatgcaaataaaaactacaatgagatatcacctcacccaaattagaatgactatattattaaaaagacaaaaagtttcaaatgctggcatggatgtgaagaaagggaacacttagacactgttggtgagaatgtaaattagtacaaccattatggagacactatagaggtttctcaataattaaaaatagaattatcaaatgattcagaaattccaccactgaatatttatttaaaataaatgaaatctgtatatctaagagagattcaaactcctatgtccattgcagcactattcacaatagccaagatatggtcaaccttactgtctggcaatggataaatggacaaagaaacacacacacatgcacacacacacacatacaaacacacacaccatagaatactattcagccataaaaagaatgaaatcctatcatttgtggcaatatgggtgaacctgaaggacatttgttaagtgaaataagccagggacggaaagacaaataaggcataatctcactcatttgtggattctaaaaaagctgccttcatagaagcagagcatagaatagtgtttaccagaggcaggggagggtaggaggaagaggatcatgcagacagattggccatgggtacaaagttacagttaaataggatgaataaattctggtgttttacggcagaatagagtttgagtcgaaagtataatacacatatgagttttacctctactttggggaaaggctttaaagccatattgaatagcaaaagagaaggaaaacaaacatcctctactggcttttgaataagctctatgagacctgcaagttactggacaccaaaggaaaagtgattttaaaacgtatcacattttgaatgccttccaagaagaacggtccagtagatgatggatttgtggctaagatcaaggggattaacagcttcttgggaagtctcccaggaggaaggctggcccgaggggatcagaactgctcccagtggaaagtagatgccacagtgatgtagctctgaaagagagtgcaccaggacaaggagaagttcctcttttaaaaactagacataacacatgctggttgcatgaggaagtggaaggaaaatttattgcctaacaaaatagccattctgctaggaaaacgtttgttaggcctatttgtcatgagaggtaaagtatctagtgttgcctggaatggggaaatattggcaaagaaagccacattgttttacacaataaagtaaatgtgagtcctccgtgttccagtgtgaaatgtttttcactctttgagacagaaatattcctcaattctagtttacacttctcagtcttctgagaagtagctcctaaacacaattctttggagtaggccctgaagatagatttgaggcagggcatggggccccaaggaagaatgggccctgtgtgagagtgggtggcagggtgggctggcactggaggagagagcagcttggggctcccacaatgggctgtggctgaggggctgagccggcatcatcaggcatcttctggcatctggtgtgaagctgctttctgctctgctctgatctgccttcgtcatgctctctacagccctcctactccaattcatcatgagattttatatccactaacttggtaggtaaggttcacctggtgtaaactgtaccaggtggtatattgggaaaagaaacagaggcgctgccacatttgggacagaatggagcagccacaatagaaataagacattagtgacgttgagcaaagcaagaagacaggcaaggtgaccattggaaagcccagggcctccttctcccacttcttagaatcttcggaaatattcgggagggggccagatagtccacggagattatgtgtgttgcagggggtgggcgggggccagttattttgcctggatgctgaagggctggaggattgcaagagaagaatgcagctgaaggttagtcatggtcacggctgtggtgtttccagcagtgaaactgacagccatggaggaatatgggaatccactttcctggatgtataacctggcttttcatcgtgacattcaaagtaattcacagcaggaaacttaacacgcactgagctctgtcttcatcatatgaagaggacagcagtttgcccattttataggtgagtatcttgagtccttaggaggatcagggtaatgtattgaaagtcatcttaggagtcagtgacggaacaacaatgtgtgtgctctgacgatgcaggtctaacccagcaatccttgttaccattgcccgagtgtaatacaggaggttggaagtggctttataagaaaaaaaattatgataataataatgatgatggtgacggttatgacggtggtgatgaagataatagcagcgaatatttcaatacattttaacagctccttatttgccatacactaagctaaatcatctacttggattatttcttcaaactgtcaacaaactaatttccatctagcctgaaatttttcatgctcagtaccattgacatttgtggctggataattcttcattgtggggggccatcatgtgcattgtaagatgttcagcagcatctccggcctctacccactggactccagcagcaacctctcctttcctagttttgataaccacaagtgtctccagactttgccaaatatccgctgggggacagaatcatcccctgttgagaatctctgcagaatcccgcattcttttccatctacctacaagatctcacccacatggggatgcagtctctcccccagtgcttccagtacttgcccctgggcagccaggtccactgtgaggccactcaattcattacatcactcatgttgaccatgaagaccctaagtcatcaaggaaggttccactgggtgcagcaaatgccactcaggtagtcaggaaaagtatgtgctacagttaagaaatatctctaccctagaagggccctcactattttgtgtttatttttattttagatacaaggtcttgctctgtcatccaggctggaatgcagtggtgcaattatagctcactgtagccagttttattcttaaagacctaagacgcggtggctcacgcctgtaatcccagcactttgggaggccgaggcaggtagatcatctgaggtcaggagttcgagaccagcctgaccagtacggtgaaaccccgtctctagtaaaaatacaaaacttagctggctatggtggtgagtgcctgtagtcccagctacttgggaggctgagacaggagaatcgcctgaaccagggaggcagaggttgcagtgagacgagatcatgccactgcactccaggctgggcgacacagcgggactccatctaaaaaaactacaacaatgacaacaacaacaacaaaaagaaaacaaacaaaaaacccaaaaaacctaaggccttagctatctagaaagtttgagccccaaagtagatacatttttggagtgttcctcataatcaagatcttcctgcatttgcctcttcagaatattttacaaatgtttgtttttgattttcctgattgcctgtctttccttgagggctgggttgtatcttattcatttgtgtgttcctgatccctattacagcagctggtatatggtagggactccgaaagtatttttacatgatgggtgagtaagtgcgccaatgattgcttagtaacaaagtaacaaaggtctttgacgattccaggagctgcactggagccagggctgctgcctgactgatcagccaaggtaggagctgaagtttcatgggccagcagcccaggtgggctcatgaacacatcagtcctgggtagtgtggtggaggtggggctgcatgaatccatccccaactgtcatatcccagtgtctgatatgtctgcacagctggaggcggctaagtttgacattgcttcaattttctcactagtaaaatggggatacaaatgcgtatctggcagggttatgatgaggattaaattggaaaaaaacaactatttcaattgtgcttgacagagagcaggtgtccaggaaatttcattttccttctcttccctttctgccttttctatctgcctaacacccctcatgctgggaacttctcttctgtccatgttgctattgagactgttaatcacatgttccaaactgaccaatcagaatactcctttgttcctggtttcagtgattggtccagcagtgggcacatgacctgggaaagccaatgagagtctttcggggagggggactcgatataaatgcagggttttctctggtctgtaaggtggtgaaaatccgaagttgagcgcaggcggccggtttgctcacatcaggcctgctaactggggctaatgataataatgatgacagcttggattgacagcacacctgccatgttcctgttgccttacaaccactatctccagcctccctaccgtctagcatgtgccttgctccatacctgccttcctgaggtgcagaggacagcagcgtggagagatggagggacaatgggtgccgatactattgtttcgacacctgcatccggttttgcctgaagtcttttcatttgctggatatcttagttccatgagtcaatattcttctacttctttttaatccagtttattttaggttgttgtgacttcccatcaagaggtcctgactaatatatgattcatctcttttccttctttcttgtttttcttccttcctttctctgccctcccactcccttccttcaccctcttgctcctctctcccctagggtccttgtctctcctagttcctagcctggatcccaattttgtccttgtctttctgtccattcatcatatccgtggagtcctcagataattgtcatactgactcctagacatttacagattataatgcagatctttcaaggctcataggcacacagctctattaggagaaagatgcggtgatgttgacattttggatgagggggtcaaatattgttcagctccagtcagagccacacttcatattgcaggcttctgcctggttcattttcatttttatgcaagcaaaccatcacaagagcccgcctgtgtttaccccctgcccaggtgtattatgaacattgtctctagttcctacctgtggctcacatagctaaggacagcagggcttacctggctggggctgagcgtctcaggtgaaaagtgccacctggaggtggggttgagaatgaactccgcctgatggccatgtctgggtctggcaccccaggagtccactaagcagtcataggcaaaggatgccatttgtctcttgggttcactagtgcagtgggtgacttctgccagcagggagttggtggatattgcagggttggactgtgtttttcagaggagcggcgatgaattagcccatttattttcccatggtctgaaacccaaggaacatctgtctgagccacaagcggcacgttttgtggctggtgggaggacccatgttgcagggtttgattatgcccatcagccggggttgcttggaagcgtcagggagagctggtgattaatcaccaggcacagtggcatggatcccctgtgtaattatccctattgccctcagagccgattatgcttccaaagggtagcggctttcggaaggaggtgagtgcaggctggcccctttgctcacaccagtcctgctaactggggctaatgatgataatgatgacagcttggattgacagcacacctgccatgttcctgttgcgttacatccactatctccagcctccctaccgtctagcatgtgccaccttcaaggtcttggccgtgttcttctaacgctgatactgttatttacttcagttttttctttaaatcaactcaattttttatttaaatgtatttttaaagtggggtacaaaaaattagaaagaatgaataagacctactatttgatagcacaacagggtgactatagttaataataacttaattgtacatttaaaaataactaatcaagtataattggattgtttgcaacacaaaggataaatgcttaggggatgaatatccccattctccatgatgtaattactatgcattgcacacctggatcaaaacatttcatgaaccctataaatatatatacctactatgtacccccaaaaattaaaaattaaataaattaaaaaataaaaaagtaagatttccaactctcttccaagtagaaaactagtaaggctttctaagaatggaaagaaaccatacaaaatatgacataaaacatacaactaaatgctggttggtagtattgcctgtgaggacccagctgagccctgcaccctctttattatgatggggtctttaatagaggtgagtgctgacctgagactttttatgtaaccagagaaatagaagggcagttagaaaaaataaagcacttctcatcatgtctctactggtatacctcaaaaaatcaccaaggtctgtgtctcaggcatcaggggtgttcatgtatttgacttcccatacttctcactcctcaagttgggctctgttacgtccatttcagagttgaagaaacagagccaaaaagaggttgcagagagaggatgttcaagaagggggattccagcccaggctctggagatagaccatcattgttctgtactagatgccatgtgccaagttctgagcttggcacttcaccttcattaccttgttctatccacattcctgccctgtggaactgttatggttttcattttatgggggacacagaggctcagtggggtgcagagatggtcccaagctctcctggcagtaaaacaaaagcagagttcttgaccagggcacggggtgctgcagaggacacacattcccactctcagatgctgcttgttctctccacaaccagctgtggggcagctgctttgccaggggccctgagtgtcggcaacagccagaataacagggaagcagagagggagtttgctggaagggcttgggggaatgcacaaatgtagggcagaagctggagaaatggacctagaaagaaccagagcctaggcactctggtgtccgggaggcctcagggctgtggccagaagacataggcaccttttctactcttttgggggtcttctcctcaaaggtggggaccttgagcaagagggtccagtggatctgctcaggttacgtgcctcccctctgggcagggtgagatccttgtttggagagtcccacccagcaggattcacacaataggaagttggggcggggggatcagggtgctatcataaagggtaagaaggctaagactaacctccgaacatgcagaagttacccactatatgccagttggccctgtgccagggggccttctatcatactatcctgtagaggtaacaagaagtcccagcctcaaaaaggggctggcaggctgggtcctagttcttctttgccatggctccagcatggacttataccctggattggttgtctcatttcaaagcagggaaagatctctgagagctttgcccagctccctggatgctctgctccaggtgatcttggcaccctcttctgggtctggcacccacacactggcacaccttccatgaccctgaggctcatgcagcctccagactcacctaccagttctcttcctgggattctcagctttctagcataccctcttccagaggtgggagacctccagttaaaaacaaaattgtacacaaccgcagcctcatttccattgtttaagaaattaattatcttggtgtatcttttccaataacagctttcattaaattaaacccaaggcatttatattccctgggaataacaggctgcttatatatggcgggaatgtgctggaatttctttagaaatcagcacattggctattgaggactagctggtgatcacaggtataggttttgaagttagattgtcaggattaaaatccaggctctgccattgctggctgtgtggtcttgagcaagttacattacctctctgtgtctcggcttgcccatctgtgcaatttggacagtaagagttcctatctcccaggcttgtggtaaggattaaacacgttcatgtaatgatcaacaaggttaactatgaacatgctcacaaagacacacatgggctcttctggcgcaatagggacgtggcctggaagctcactgccacgtggcatttgggaccacaagggatcagacctcatcgtctgtgcacagatagacaagatcataaagaggaaaaattagcatcgggaaactggttatttatttaagattgaaagcgggagaaatctgccctggacatcttcccctctcctctgtttgttttgtctgccaaacagaggcagtaccccctctccactctatttattaattgagtaaactccgtgatcctaaatgcaaacaaacatggggccagcacaaacaagcacgtgcttcctgtacgcgccacttctgagtagcagcccgagcaacaggtggactggctgggagacagaaacggctgcagaaggcgcctccaggatttggcgtgagagccctgcaaggtcagcccatgtgctccttctttgttagattgtttgttcattcatttgtttattcattcctttattcaagtgtttagtgagaacttccatgtggaagacaaagacctagctcacaaggggtgcatggtctagggagctaggtgtggacaaagagccacgtaggatgtcagtgctgagatgtggcagccacggggagctatggaagggggcagaaagaagaccccagagctcagggaaggcctgcagggcaagtagggagttgtcagcccagcaaagagccaagagtgtgaggagaaggtctgccagcgcctgaaggggagaagccatggttcaccagcttcaagagttgatacagttgaaagcatcatctctccatggccaacatcctgggctgtggctttaatttgggcatagtgtgtgcctgcaaaacctcggctgtattcaacctagtctgccattgatggagtgagaactgcccccaaattatttacattcaaatttggaagcaactgaaacccaacagtaggagattcattacagtaattccatggaaatggaataatacgctgtcgttaaaagtgttcaaatcttttatggttatgataaatctaataataaaatcgagacaatattagaatatatattttaacattttcctagttttgtgaaaaaagccccaaatatctgtatgagcctagataaatgacaagaaaggaaaacagtaagatttttataatggttattgctcaatggttggatttttaaaaatactcttctataatttctaaattttatgccctgaggatgtattacctccatagtcagaaaaattatgaaaggtatttaaaacccaaactggctttgggcatgcagaatgcttggttatttctgaagtataaaaataactccccctctgtcccatcagcacgcgtgttgcagggagtctgacgttgctcgctaagtctctttggtcgtttcatactaatgccctttgctcccctgattatctctctgaggttggggccgggggatgggggtgtgctaggcctcctggatgtctgtctgctgccaaaacatcctctcctgtctctgtctcattggtgcattttgatgaacctgtattgcctggtcactgcgcgctaaccaccaaattatgaaacatttgtgctgcaagggagctgagagatccttaaactcaatgaaccattaggcataagacacacacacacacatacacacgtgaatacacacaaacacacaaacagcttggctgctctgggtgaagcatgtgtgtgtttgggggaaatttccttccccacccgtggtcgtccatttgcccatgagcagcttccgaggcaggtccgtggaccccaacgctgtgtaacaccgtgtgaaaaacacaaaggcttgcagccctctcactgcagacgtgggaacacgactctgtttaaaacccttcaaagcccgccttcttgccgtgtgatgctgcctgggccagcagggcaggtcaccacgctgtctcttcaaagcagctcgctcatgcccacagcgctgggcacaagggcagccacgagctgtttgatttctgcgtccccagcagatggcttggtgcacaggggcagggctcgtctgtccctctcactgctgcgtcccaggctatgtctccaccatgtaacttcagacaagttcctcagcgtctctgtgtcctggttccctcatttgtaacatcaggatattgataaggatcatagtaatagggatgtccttatggggcctcatgaaaatgaagagttctctgtgatgtgcctggaaccacagagggcagcaagtgggagccacagaaagtcatctctttatcatagttgtcattggtaactatgacggttatcaagggcaggggtctcccaccttctgcatccaggccttgtcattccttataaaattttctcctttcaaggactttcaatgccctgaaaacggaatgctcctccctgctccccatcagctgctgcagagccctgaaccccttgaacttgccttgcttagttctttcaggggctgccttggatgccacctcacttccctcttcttggctctgtggctgtcagaggggctgggcactgggttacttcatcagttcctgggtgttgatcggcaggaaacagtggtttcctgttcatatcctgcctgagcctgggccgggtggaggtgtcctgcatggagtcttgtgaaatcgcgtggactgcaacacccagcagcgcggtgagtccaccctgaaatccacagtgacccacgcggcatgtgctgggaattgaacgcttggggaaagagctgggctccagcggatcagccccgaccaagtcgttcccacagctcaggaccggacgctacaagcccactttgtagcagtttggcggacggcaaacttttgcaacacagtgcaaaaaccatttaacacctttaagggaattggaaatgggtttttcatgtgtggtggtgctgaaaattgagaataatgacagaattattaaaaacagccttctcggccttagactcttaattgcctctggtctgtaaaactgacaaataagcactgtagaagccacagatgaaatatgtcgtcttgggagccctggagaattgtctctgaattcttttgtttatggattgtagaaactgctttgggggtagttggatgtagaagcagaaggacagagtggggagctgggagcaggaggcctgggtttgtctcctgagtctgtttccactggggcctgaggctcccgtgtgagggaacatgaatgggccaggcacatgggccctgtggggtgacagagctgtgggctccatggtggctctgtgggcagctagcttggggatggctgagataaagacaagtagttttccttcctgcaggacttctcagagcctttagtgtggttataatgatagaaaacagtattaagtccataccctgaaccagaaacaatgctaaaagctttgcacttggcctttttttttctttttcttttatcaacatgtgtgaggacggaagcttaggcttacagatatggactcattgagagtgagtggacgtgtctgatctttaacccagttctgtctgaccaaaaagcctgtgctctaaccactgtgcacccctgcctgtctgtcctgttgagagaactgtagggaaagccttgagattatgtatccagtgctcccctcctcctgattggaagatggcagctcagaaggttagggtgccttctcctgtcctccgagtggttagatgcacgtgtcctcttctgtcctctgctcttcccacatccctctctctctggtgctctggtggagcccctgggatcaggggtcacaggagcacctgggccatttgcatggttgttggtaaagggtgttcccccaccccccattaaggtgcctgccatcaaagtgccttattgcttgagttccaatctcggcttcacaactctgtagctgtgtgactttgcacaatgtactgagcctctctgtgcctgaacatccttgtttgtagatagtaaagataattgtcccttactcctaggtttcacattgagtgtttagcaagttaacgtttgtaacgtgtgaagtcataagatgcaggactggatgactgccctacccacaagaggcctaggatcttcccaagttgcactacttatgggacaggtctgccaagcagcccttgtgaagataaaggtggtgatgagttcctcccacaaaacaagagcctcagagagactggaaaataacccccggtgccttttatcaactggccagcagatggcagaagcaagccaggaacagagcttgtgtgcggcggctgtggcagctacctttgaaaatcccgtggtgtttggtggtcgtattaagagatctctggtgtaggagcatccttcattctaagcaggattctgaacaaactcagaactggctttgtggctggtaccgaggacccaggggtcacggctgctcccagtgggtgctgatgcccatttgtttgtgcaagttggtcccctgtagggaggacagatggtctgtctcggactttctggcctgtgcaccaaggcccagggatggaagtggggcagcatgtccccatcattaaatagggcgttcttgataataatcccataaggcctaatgtgatgggtgtggtcaatcattcattcattctgtgaggattcagtgagcagctactccatgcctctaggctctgaggacgcagcatgagaaacacacggaaggcccacgatgaccagggagctcgccttccagggagagaggagaaaaataaatggtagggagttaaacacgacaaagtagaaaagggccagctgcaagaatgaaattaaataggaggctggtggcaggggggcagggaagcctgaagcacctgactgcccagaacaagccgcacctgtgaggagctgggaagggcactccaggcagagggagcaccagagcaaaccctgggagggggatgagcctcttgttgaagaactagaaggaggccaatgtggctgagcagaacacatgaggcggaaggaggaagtgaggggccctgggcctggccaccaaccggcagatcaggggtgaggactccacttgggagagtgtgaatggcccagtgtgaatgacaaagcagtttcatgcagctcagcctgtctggctaagtgcgcagccctgaggattgggctctgagcgttgcagcccttctgagtctgtgggcccctctcccaggaggatcaggttgcccagggcagctggaaatgtccttaagtgactccttgctgctgctgccgctgcgtcttgctgacatcatttccccgcaacaagcgctggtctcctggggcggctgccccctctcatctgcacatctagctcccctgccaggcctgtgctgttttccggggcctcacagagaagctcaggcaggtggagcctcagcaacaggcgccatcctccccttcagcctgtcgcggctcctccctggggcatgcttgaaagcccagacatgttcttcacatctgagaaagcagttaaactgaaattcctggcagactcaggttcaaatccttattaggctgttaagtgagaggggatttcatttccttgcagccgccctgggtcctgccactgagcagctgttggtaggctctgctgtgaggtctcctcttccggctttcccacttcccaaggtaacctggtgtggggaggaagccgggggcctctggtgaatgggaacctgtgcaaagaaggagccgagggcagggagaggtgggataagacccagcgtgggggcctgaaagtgaggccagcagagagtcattgagaggccctcggagaatacgttctggggacgcagtcagggaacacctgtttcctgctgtgtgactctcacaacccagctgtggacacacacgtatgtacatatatgcacacacaggaacacatatgcacacacaggaacacatgcacacatggacacacatatacacacgatgaatacacatacagacacacattcatatatacacacatacctatgtatacacatgtacacacatacactcacatgcacatgcacatatagacctacagatacataaatgtacatccttatagatgcgtacatatacagtacacatgcatgtactcacaaatacttatgcccacatctacatatatgtataatacatatatacacatatagatatatacatatatactcacatgtctatgtataaacacacacctatatgcacatgcctatacatatatgcacatacatgcccacatacacctatgtaaacatatacacacatctatatttaaatatgctcatgcatgcatatatacacacatatatacacatttatgcatgtgcattcatgtacatatacacacatgcactgacatcgacacatgcatgacacaatgatatagatatacacacatatatacatgcatgaacacatctatatgcatacatacacatatgtggatatagaaaaatagcagatatacacatacatgcacatatctgtatgcacacatatatacatacagataaacacatgtacattcatctagatttccacatttacaagtgcatattggtacacatatgcatacatatgtgtatgtatgaatcttttctccctctatatcacacacataccttttgctgagggcttagtatttactaggtgccagactctgctctcttaatataaggtcgccccaaaacagaccctgagctgaggattcgggtgcaagcggctaacatggacggtgatccagcagcaccgtgaggaagtggggctgaaacctggaagggagcaaggccggggattagggtgaccacagacaaggccatcactgaggaccttggggttcaatttctccagtgggggtgtctaagccactatgttgcgtcacgtgtcagaattgccctctggaggactggaaaactgggtgttgactgccacttcctgctcctggccatgaactcctggtgcttctagtttgcccagcataggccatgtgctcctggggccagcgagggtccacaggcagaggctggggacctgtgctgcaggtgatcgcaggtgggccctgggccaccacacgctccacacaggtgctgcctcatgggtctttcacaacaacccccgtttgacaaggaagaatctggggcttggggaggtctatagatttgaggggtgttatgggcgaggctcatagcagaaccaggtcaagaatcaaggttgtgtgattctagcaggtaagtcctgacaatgactggcaagtgtgagccatgcaggggcaggacaggcctcatgagtggtgacaggaggtggttcagggttgttttgcacagccaggcattctttgaagggcagctgcagtgaagggcctggctgcacagccagcctgcctgggtccagatcccagactcaccatgtcctgagggagcttgggggaactgcctgttccctctgggcttagtttctcttcaacactaagaagactcagttgagtcatgttcatgatggagtgcttgcaacaccaccagagaggaagggattgtgaatgaggccgtcctggggaagcgcaggtgtgttggggtgggcgggtaaccaggtattgcgacaggggcacaaggtggcactcagcctccttgtgtttgtagcagacttttgaacactagactttctggtggcacctgtagcacccttaaaaagtgaatgctgctgcccaaattaaatctgagcagactgaactgaacgtcccagcataacctcaacgtctctggggccccatctgccctgctcttagcatcccactaagagaagcagcagacactcaaagcaattggaaaaatgacctgagttcatccaaaccctttaaggagaaacctctctatgactttccctacgattctttcaccccgtatttctcccctcccatggtctcactccagagcttttccagagcccttttctttcccagaggctccttggagccagccctcacggctctggccttgttttctgctccacgttttagcatgaggcaggcatgctatacggcaaacatgacattttctttagtgggtaggggaagaggagggctgaacctctagcgcccgaatgcatttgtccctgtcacacacagtcattgtccaattaccttttgggagggaaaacccagtactgatcactccgcctactccagtttttcctgatctgaatgatctgccttaacaatgtgttaacattttacccaagttcactcagaataagaaagtgcgtagaggtgcccactagagggtgggcgcacagcagtgggcatctcggctctctgcccgtggggatcctgccaggttgttcagagcagctcctcagtgtcactctcctccccaccctccctttccttggggtctagccgtttctagctccagtgttgcccctcccaagctggatgtaacctagcttctgtcttttacctgttacctcatttgtgcagttaacattttatgcacgtcccttacagtgtagaaggaaaacataattctaatctgactccattcagtgatgttaaatactgcatgtgaacatccccatccagaagttcatccaatgtagactcatcaaaaagcaggagtcctaaatgtttgcattgtgcaagcatccttagcacattgctatataggtgtttaagagtgtcttaagagatatttggaaaattggttggggattgtttttgttggcctgggaatgtattattattttttcccagttcacataaaggggtgaagccctgatgtctggaaatttgctctccaaagtgtttccaggaattgacaatatttggataatgaggggtgtctgtactttccttgacctaaactgctggtagagggggatatttttgtatgattgggcaaggtcaaacacagaatcaaatcaggaagaacagggtctgacatgatgaatccctgcctcgccttgccattgacaagagacagaataaatgcccccaaagaaccctgcaccatgaacgcttgatggcaatcctgtctcagggctttgctgctcgctgtcaggcagcaggtacactacccagggccgtggggaaggcgtcttgcagccacactgcagcaggaggctggtcatatctacgggctccaccaagccaggatgcagagctcggcccgtctcatggcacaggctcgggctgctcggagcttataatgaattagagccacagctgattattttcaaggctggcgctcacgctgggtgcctgagaagacgatgaatctgcagtgccgaagtgctgcctggcctctcaggaaccagctgcagctgggattctctgcagccttccccgcagcaagctggggtagccatgagccctgcctgtccaacgtggggtcaggcgggcatgcctgctgtgtctggcagccttgacacccccagattctgctggaagatgctcgtggcctgaaagctcattttgtagtcgctctaccctgggatgcagcttctgcactggcaggattaacgcaaacagaatctgcttggctcattcctcgccgggcctcaacaggcctgcaacgccactgtctgccagggagagccactcggtgatactgttaattaaaaccatgactctgggggcaagaaaaaattttaaaacgctgaagtcatcttccctaatagaaatcttattttgaaggtgctcacggaggtcaggctgaccagaaaaacccacaagccataaataagctcaaatagttttatttaatttacttaactcggtgcctggagtcctcatggggagaggtgcctggcatcaacacagggtgggggtggccaccctcatctctagcccctgggtcccagagctgagaggagggagagaactgaactttcttggaagaatgtggaactgctgagtagatgctttggaatttgctgacccaggcatctgggagtacagcctgaccggccatctctgcgccaagctatctatagtccaatggctattttcaattggaaattcattttaaagtggtggcagtgacgggggagtggctgtatctgtaatccattatttcacacagagaattcccttctttcatttttttctggccaaagttgctgctttgaacgtgggtgggtcttggagcccaagactgagctggctgcttggagaaaaattggagggatttgaaaaggcccgagggagggtgtcctctgagttgggggtggcagaaaacatcttaaatgtgcaggcccaagccttctgcagtgaagggaataggactctggcttcggcagacctaactcagtctctgggttcttgggctaatttgtgaaattacctctcccctcaggactgggagagaacggccttaaataagtgcaatttaattcccttgattgtggtcctctttaatgaaaaaccaaaatttattctctctcctgctagtttcccattgaaagtcacaagaaatgaggctggggtggagggcctggagttgctatggaagcatgatgcctagaacccactatgggatggatggtcattggtgtcacggactgtggtgtagacattgtctcctgtgccaggatgtggcctggtcctgcacccctttgcctttgaagctgtgcctgcctgtgatctgggagtggcacgaacccacagaacccagcccaccctgcaggaagtgggagagctccccgggtactctggtgctgaggaagcacagcttaaagaggaaatttccttgaaatccacacagacctccttccagaatgttctggaaggaagcacaacttcaagaggaaatttccctgaaatgcacacagacctccttccagaatattctggaaggaagcacaacttaaagaggaaatttccctgaaatgcacacagacctctttccagaatgttctggaaggaagcacaagttaaagaggaaatttccctgaaatgcacacagatcttcttccagaatgttctctaaatcctcctccaattcaactgtcatcaccacagaacccacaccctatgataaatggccagagcccttactgtctttgttttactccaggcgtctcaggccactaacaaggaggtggaggtctcaaggctattgtcaactgattctgctggaggccagaccaaaatggctttcttccgtgacagcgtcagtccagttacaaatctcccggttccatgataaaggatttggctgggctatggccctggtttcttggaggaaacctctaaatccttgaaacttcccgagtgataggagaatctatgttattcatggtgggcctttccaaccatacctgagtttatgcttatgaaattaccaggatggaagctgaccacaccagaaaggtcagccaggtaattggaggcttggggctttgaccaacatgacgtcagtccttcagtgagtggaggagggctggagattgagtttaattgcatggccagtgagttaatcaatcatgcctatgtaacgaaactccaataaaaattctggacatgggctcaggtgagctcccaattagtgaacacatcaaggtgcctacaggtgatatgtcctgatccacagggtgatgccatggaaccttccaggcctggccctatgcatctcttcactgggctgggctgtatttccaccatttgataataacactgtaatcttatcactgcagcagtttcctgagttctgccagtcgttctggcaaattatgaaacctgagggggttgtgggaaatgccaaatttttggccagttggtcagaagtgccagttctggggagcctggagctcctagctggaaattcttgtggacagtgtacctggcctctgatgtctgagccagttctgggtgttgtgtgttgggatggcactgcagtccctaaagcaagttctggggaatggtaggaaagcatccctgcatctatatttccatttggtcccggtctaaagcagctggtcctcagaattgtctagggggcttttagaaagaagagccttctggaacccttcctgaacgattctgatcccatagtcccgcaatgggccctggagtctgtatttttgaaaagctttcctaagtagtactgaggcagaatcatatttgagactaactttccagtgcagccaggcatacctcccaaaaagagaaaatctgtttgaaagaagggaaaatgcagaaaactggggaggccattccccagtgttctaacaagtcagggaacaaagggacggcagatagaaagttccatgccgggaggtcagtgctgcagcctgcgtccttacgctgaggtcagtctacgaaaaggcatatttggtgaccctgcatccctttctgggtgttaagctctggagacacttgcgaggccttcttccttctccatatgtccccccttggacctttcagatgtccttatggtcctgacatcagtatcctatgatgggatgcacatgctcgacctcggggaccagctggaagccctagctgctgctggcaggggccaggaccctcagcactgagggtctgggtagatggaactgcacaccttgcatctggggcgaggaagcatgtcctaagaactgagtggcgcacgaggaattcacgtgacagtttctcaagctggtggccttctccctgtctcctaaaactgccctgagctgcctctgtctcccaccggggtgacagccacatctcctctctgatctccctgcttctcatcttgcccctatgcagcctgttctccacacagggcgatcctttaacaagtcaaccatccatgtctttcccttgcttaaaatcctccgaggctcctttgcactgtgaaaattagagcaagagccctggggatctgtccttgcctgtttcctccccctcacttggtcctgtcatgcatcaaatcatagccacatggtttttgctttctgtttttcaaagaatttcaaattctcttctcccacagggcctttgcacaagcttttcccacagcctgcaacacctgcccttcttccccacacttggcttgttcccagaaattcatcatcctgtcttaaatgtcacactcttcagagaggccttctttagcccagatacataggtaggttgaccctattgttgtctgtgacattatcttcttgatgtctttggacttaatcacacttttaaatatatatttgtttttcctgtctcttccacgaggctgttgaatgctgcatggacctgtgcccggcacagagaatgtgctggtttcagtagagtaattaatacaagcagcagcagtgaataacccagacaacgtcagtggcttatcttggaaaggttttttttttttgagacagagtctcgctcttgtcgcccagtctggagtgcaatggtgcaatcccggggctcactacaacctccgccttctgggttccagtgattcttctgcctcagcttcctgagtagctgggactacagatgtgtgccaccaggacctgctaatttttgtatttttggtagagacggcgtttcaccatgttggccaggctggtctcaaactcctaacctcaggtgatccccccacctcggtctcccaaagtgctgggattacaggtgtgagccactgcgcccagccaaaaaggtttatttcttgatcacatgactcagccagagcaggtgggcatggacctctgctctccccactccacctaaagaaccttctccacctcctggtctccttacctggaatatgtggcctatgaggtttgccaaagaggagaaaatggagacacactagctgttatcagcctggcagccacaggctcacttctgttcttggcccatttgcctgaccagtcctgtggctcccaccacctgcaggagagtggggaacagaggaggcaggaaagacactaggaagagtggggagggaggagaactgcacagctggagagggtaggagggatgctgagtgggtgctgctgggaggagggtatgtactactgggaggagggacgctgggtgggcactgccaggaggagggatgctgggtgggcatttctgggaggagggggggagggggaagagccacacagcccgaggtccgtggcaggaggagatgacaagcagggagaacaccaacggaataaactctgcagtttccttcagatcatccctgcataggtgtttctcgaaactcatgttcagtgagaacagcaggcatagactcaggacaaaccctccatctcctttcaggttaggttggcccatgggctggagcgtctgcgtcttggtcggcccggcagtgtacatgtcaagcagcgcgcaaagactccacagccattcgtaggcactgctggcctcatgctccagacagccctgggacaatgggccaccaagggaaatcaatgattgcgtgggcgcaggtgacctccagcctgcttcagggccacccttgttccccatgccaactccctccttcctatgggctcccaagaaatgggtggcagagaccagcctggtgatttacctcctgcctttccgtgacttcctcccagtcctgtgcatctcatgtttaattatgaggctgtggaaggtggtgatattaattatagggctgaggttgtgttacttggagaaagtcagtgcacatgtcatttgattttcctcaagaaggaaaactgtattttttccgatctcaaaaataattccagggaaataaatgtgtacaatcacactttggggtttaaaactaacgagtttcagttttaaaacatgttaaaaacctttctatttggagaaagctggaagaatccactttggggatctggcggttctcaggagctgtattacctcgggatggtctcactggttggtagcagcttttgtatgaggaggggcatggggtcccgacttaggcagagaaggctttgctgaagaggtgcaaagcccagcttagggctgggttttctacagaccaggaacaaaagcattgcttggcaagatttcttctctgctcagagaaaacacgcagattccaaagagtgagatggagagaatttgacatgtcttggtttgaaaataagtcaaaagaagtctaatattaacaatagcaataataataacaaccattaattgtgcctgcgttaggtaccaggccctattctaagtgttgtgagtgccctctgtcatttaatctccacggagtcctgaaggtgcttcccaggtttgtccccatcacacagatgaggcaatcgttctgttaagactgtccttgggtcattatgtcagcaatgaaatcggtgctgccattactaaacccttactgtgtgctggcatttgtgtatgcatgcatgtgtgtgtgtgcacacgtgtgtgtttgcgtgtacatgtgcatgtgtgtgttgtgtgcctgtgtgtgcacatgtagaaagaaagtgatgtgtgggaatggagaattccaacccaggaggagactgtgcctggggctgccatgagaagtggtgacacttcgagaaacgggttccaaatgcacgttgccttccagttctctgtgtgaccttgggcaagtcacttcagctccctgagctttgtttttaaaaatattttttaaatgtataaaaccatggaccattacatatgaagagaaatgtgtgtgcaaacattcagttaataatcacaaggtggaggagtgcctgctcagacccagagctgacacagggaactctcccagaaggctgcagggcttccctcccaaccctccaacggcccagttgctgagcccgtgcttatctgttcagtggaaatgccatgtgccacgttcctcagaagtaaagccactaggtaagtgtgacactctgtgcccagcttggtgcaaagcctcttgtgtgtgctatcttattgacctcccaaatagcatggtaaggtcagtactgtcacttcccccactttgaagatgaggagagcacaaattctagatggaaatggaggtcacgcagtggaaataggatccagacagattaatccaatctcaagcctgaattcttccattccacgctacgcttgaagctcaatctctcttcctggttgattctccccacttccccacccccagatatatcccatcgctgcttggtggacagtagccatgactgggttttggtaaaggttgctgaataatcaggctgctggttagtttttacatttcacctttcccagtgaaatggggccccatgaaaaaggcagctcaagttgtaaattactcaaaggaaggacagaaaggtcttctgtttgcacctaccctaaggatttggggtagacactgggaatttactaattatgaattccagtgctttccttgctgaaagagaggcgtggaatcaacgctgagtgaaggcatcaagtttaagctgctaattacttcctgatcatgcagaataaaagctacgtcccttgaaatacaccaggcagctaaacataatctttgcgtttccgtagtgttggttaaggaatccagatgttactgcaataaccactccataaacaaaaggaacacccagctgtgagaactggcttctcagcattcgtcccagcagaggctcttctggggccagccctggaagaacccatcagggttctgatggttgccctgtttcagcacagcccttattggcaggcagacggctacgggcacagccacaggctgaaggtgagtccagcacacaactttctgacagtgaacaggagtaaacatgggacccacccgaaacctttgtctgttgacttcttagcaaatggaggcagctctaggctctggagagttcgggtataggagaccatgacttgagcagactgatataagtggaatgcaaacatatttagatggcacaacttaatttagatttatcagtgctaatatagaaaaagctagtatttattggggcttattagatttttagtctgaatcctcacaacttacgagggggttcgttttacagactatgatcttgcatgatttccccaaagatgctcattaagtatatggtgaaagtagaatttgaatacagaagacctggttctgctactttctgtgtttctatttggttcaaaccagcctttcttctttcaaaacaacttcagtgcaattcatggttttggaaaataaacttgattttgagattcagacaataagtgcatttttaatgtttattcttttatcttgaaaaactgatatatttatgaaatgatatgtgctcactcagtgtcaacacttcaaacaacacagacagtacaatgacaaattggagatcagctctaatctcggcccccaatttaatgcattgctgaatattcttctgaacatagtccatcccacactgtcccatgacacaagacgctccaaggggctgaagatagagggacttctgcagtcaagagagctgggaaactcttggacagtcacaatgtgcatttgggtattaaaggctctgcaaagttctgcaccaaataaacccttggattggcttgatccaatgccatgtttccaaaacctacttgcccgtgggacaccttagtccataacacaggttggcatttcttctagagagtgtgctgtgaaaaacactggtctcacagcaccgtgcattcatccagcaggtatttaccaagcagggactttgggccaggtccgtgctaggctctgcaggtggaccagccagccctgacctccatggtgtctcttctcatgggagaggctgcacagcagtcattgagaaaacgaagaaacacacaggtactttcagatgctgataatgactaccatgtgctaaaagagctccaggtgttgtctgttttgagacaatcttctcgacaatgagatagaatgaaccatgcaaactttgggggctacgatggttttaggaaagagctagagtgaaaaatcctttgacatatatacatacaaataaagatacatgtgtataattttatgtaattgacatcacattatatgctggcacctgccttttttgcttaatgaaaatgtcaaaggtaatattaccaatcaatcaatatatttcaccatcgtgtttaatttctgcagagcacttattcaagcacatactgcatttttcttagtcactcactggtgggaatagaaagttttctcaggcatgcatttttcccacttctgaaatgatctccttagaataaattccccaaattgtattgctgggttcaaaggcatgaacattttacatttttatacaataatgtcaaactaccttccggaaatgatgctcactttactttccctccaagactgtgtgaaaatgcccattttcctaaatgcttactatgactggtttccaactacattttaattcttgttcaatctgataggcaaaaaatgatatttaatttttatttgattgataatgaccttgaacgtgcccattagccttttgcatgtattcttttatgaaacatctgttcctatccttcgtcaatgttcctcttcatatgttaacttttcttattgatttgttagagcactttgtatattgtgaatattagcttttgtgatcagaattatggaattgttgttgtctttagttttgcttatcaagtttaaagccattcagagatgttgtaaatgtgtatgttgttaaatttatgtcttattttgtgttttctgatgctcatatgtttagaatggtcaagcaatcccaacttatgattacttaaatattctcccatatttgctcttagcattttttttcttttcatgtaaccctttgttctttcaggaatttactttgcggtaagaaatgggctggcttccagttttatgtttcccaaatggtgattcagctgttccatttccatattctcccttattagaaatgaccactatattatgttctaaaatatctgcgtacttgtgtcccttcctataatctcagttcatctctttgagctatcttttgattcctttttcaaaccacactgctttactgaactgtcatcatcttatacatttttaatactcagcaagacaagtttctcaatgccactctttttcagagtttttctggtggttgtaagatgtttattcttctggataaactttagaatcactctttttgtccaaggtaaaatatatcccacattgagatcatactgaatatacagactaattcaggaaaaaatgtatgtctttattgcattgagtcttcttatccaataaaaaagatatgaatttccatgtattgaaatcttcactgagacttatttttggcttttcacatgtcctgcaaatgtattgttaaatttatttttaggtattttaggggaaatgattttctaaagtttgtattttctagcttgttataatttacatatgagatagtcattgttgtatattatttataactgatcatattactgtatttgtattgttttaatagtttttctattattttgggttttcctggaatacaaccttattatctacaaattatgattgttttgccttttccaatgttcataactgtttttatattcttgtctgattgctttgttcagcacttctagaataaagtcatgcaatactaatgataaagggtactctgaacttgtgactctcataggatgcggacagtatttttacaagaaaatttgatgataatttttggattggaatgtgcagtaaaaaaattctacggtgctcacacctgcaatcccagcaccttgggaagacaaggtgggtggatcgcttgagcccaggagtttgagaccagcctgggtaacataccaaaatcctgtctctacaaaaaacaaacaaacaaaacccaaacgacaacaaaaaaacccaacaattagccaggcatggtggcacacacctgtagtcgcagctactcaggaggctgaggtgggaagatcacttgagccctggaggtggaggttgcagtgagctgagatggcatggcgccacagcactttagtctgagcgactgagtgagagcctgtctctaaaaaaaaaaaaaaaaatcaaaaaccaaccaaacgaacaaaatcttataagaaggagttattgataatttcaagtatcagaaatggatgttaaatcttatcaaatgtctttatgacttataagaaatgatcatatacttctttatcctttgtcctattaacacgttgagagtattttttaaagtttcccaaaccatatagctcctggattttgcaaatgagttccgcatcatcatggcgtgttatttaccagcgcttttctcaagctttttgggtgaactttctctaattaccttttctgcggggagtctgtgtcaggccctggcattcaggttatgctgactgtggagaaaccattcagtgactttttgtctttctcaatgtactggaattgtttccatagtacagaaataatcagttccttgaagatttgagaaaataagactctggcaagcagtaacttctatcccactgttgggaatataaatggtttcagccactttggaaagtcttttgttaatatctagttaagtcaaaacacttgtaccctatgcttccgcaactctactcctctatctgggccctagagtcacggtccccagcgtttttggcatcagggacgggttatgtggaagccagtttttccagggactgggttgggtgggggatggtttcaggatgattcaaacaccttacatgtactgtgccctttatttctattattattagcacaatacatttattgtgcactttatttctattattatattgtaatatacaatgaaataattatacaactcaccataatgtagaatcagtgggagccctgagcttgttttcctgcaactagctggccccatttgggggtgatgggagacagtgacagatcattagtctttagattctcataaggagcacataatctagatccctcgcatgtgcacttcacagtagggatcacgctcctatgagaatctagtgctgctgctgatcagacaaaagacagagctcaggaggtcatgcaaatgatggggagcagctgtaaatacaggttaagctttgctcactcgttggccgctcatctgctgctgtacagcccagttcctaactggttcctaacctgtaccggttcacggcacggggttgggggccctaccctagagaaactctcttatgcatgcccaagaaatcgtatgtgtcagaattttcattgcagtgttgttcgtgctggttaacaaatcagaaatgacttaaatgttccttagtagcggattggattaggtaatttatgtagtggattactctgccacagatgaaatgattaaattaggtctactgatatcgacctgggaaattctcaaaaaattagtatgggggaggagacagtgagaagaaagtgaaaaagaacatgttcatcatgatacaatttgtgtaaaaataacaggaaacaatgttacatataattttgttatataacaaataacaggaaataatgttatatataattttgttatataacaaataacaggaaacaatgttatatattattttgtgcaccaagtgtggataatatatacacatatatcatcaaaagcacagaagagaggggtattaatcaccttcaagaatcagggtttcccctgtggagggagggagcggagacaaaatggtaacagagaagtggagcttcaaaggtcttgtagtatttcatgcattaaccaaaaaaggtctgttgtaaatacagaaacacatgatatctttgaaagctgtgtggtggggcatggatatttgttatattaaccacacttcatttatggtctttatgaatttctatctggtttctccattaaggattagagaggtatttcaaaggctcctattgtatttctaccaattctgtctgttcatcttccttttaaaaattggagatggaggctggacactgacaattgttattctttagatactttgagttagataacacagtgcttggcacggggcaggtgtccaataagcgctaggtggcatcatcatcctcttggacactttggctctgtgtgcatccctccaaatcctctgttcccttgccttggtgtgaagccagtgcgcttcaaggtgaacccccgtggctcccagctcttcccaggctgaggtgggcatggcgccccatcgagaagttggagcataggcccttgtgcttggtgagaacattatgtgtgtccctttttgactcctttgacttgcaacactgattcctaggttacacttcgggactgcctgccagttcgtgaaaatgacagggctgtcccttctcacctgggtcctgctgttcacctgacctgctggggtggggcaccagcccaggcagacagtttctctttcttcctggtaacctgtggtccaggccccactctcacatcttctcttacttgtccatgagctaaagtgactcacctcctttgcacctttcactttgacctgatttggattgcttctggtggatttccatcagtgtggcatggcggtgtgctttccccagtttcagggaaggctgacttaactagtctacttgtggatcctttgggtccatggatcttactttggggtgattttgcatgatggggatatttggcaatgtctagacacattttggtcatcacagctgggcagggacagagggagggtgtgctaccagcatctagtggtggagaccagggatgctgctgaatgttttaagatgcacaggacaggccacccccctttaaacaaagatttatccttgaagtataaatagtgcccaggctgagaaactctgccttaggcccaatgagccaattttactctggtatgcctcactttgcttcaacagctgggcttcggagagacagcatgcattttacattgatgtggtctgatgtaacaagcaccaggcaccttagtatcataatatgactgattagattatcatttgcattgtcattttgttaatgtgtagaggaggaaatattactggaagtcagaagatggatctttgttatgccaccttcttccattcatgcatgcgtttaacaactatttacggagcatctactatgtgctggatatcatgccagatgatgcccttttagtgctctcagtccagtaggaacacaggggaaaaaacccaaccaaatacacagataactgtatgtcttggagatggtagcgtgtagcagaaaggaaataagagcatcagggaatccacccatgtaggcggtgtcttagcctcctgtggctgctgtaacaaacaccgcacattcaatggctccaatcactagaatcatattctctccaggtgttggtagggccttgctatttctgggggctttagggtaggatccttccttgcctcttctggttttcggtggcatctcctggccttcctccctgtgtagctgcatcactcccatctctgtctctgccgtcatgtagacttctgtgtctgcatcttcttctctcctgtctcttgtaagggcacgtgtcattgatttagggcccactctaatccagaatgatctcatctcaagatctgtaattacatcggcaaagaccaggcccttctttccaagtaaggttacagtcacagattctggggattaggatgtggatatatcttttgagtgacacttttcaaaccactacagatcagcaaaatgttccctggaagcccctagctgatttcttttctgtttttttttttttttttttctctttaatcaccaaaaggagataaatggattaggccaagcgagattcatccacttttcctaagcacattgttgctcaaacatagatttctaagaatcaagaagaaggcagggagccagcagggtctgccccagaagctctccctgattttcagatatgccaaactccatcttctctgtaggtttttttctttttgcttaaaacagcagttctgaagcttgggaaggcatcagcatcacctgggagccttgctaaaacgctctctcctggagtttctgctcacaatgtgcatttctaaaaagctcccaggtaaggctgatgctgccagtccaggggccacactcagagaaccactgctctgaaacattcttcctgctcctggctcttgtcactcttgtcttcccccttgaggctcccttttgcccagagcttcctggtgtctccaacccatgggtttcaccctttccttctcttctgtggcatttaccacagaaatcttcccttcagctccacacagggcacatgtcttgcaggcacagatgttgtctttctgtctccattttcccagcacccagcgcctcgagtccacagggacggcaatgctgagcgtctgttggatgaacaagtgaacgagattcatgcacgttcttttccttctctgcagagtgcctgagcctgccaggtcttatgctgtggtgggctctggactggagactgggttcaattagtgcctcagcaatgtgactctggttaagccacttaaattccccgagcctcagtttccccatctgtaaagtgggcataatagcacttaccctaatctcaagggtatcaaatgtgataaaaccatataaagtgttcattgcatttattaagtggctgatctgtgttaattactgttagtatcatttaaggctggaggagtgcaccttagttttctcttgttgggacaaggccagttggttgtgtgtgccccttggtttaaccctagggcagaacttctttggtttggggtgcaggcctcaggggtgcagggctgagaggcagaggctgagtcaagcccagggagaaggctggtgtgttgccctggagcaccagtttcctccacagtcagcaatgtcagcctttgaagactattaagacaaatgcagttacattacagaaagcaataaaaatgcttgtgaatttttaaggtaagatacctagattttagccaggtcctgggctggggccccctccttgcagacgttcccttcctttgctgcctctcccatggcccctgcacaaggctgcaggatgggtggggctcaggccttgcagcagtgaatggattgatgaagctgcccttcaaggcacttctcttttccttacacaaatgcttttgcaactcctgtgccctgaggctctgtcttaaactggtgtaggccccagtggcagggctgacacctgacagctaagcctgggaggaaatgcttttgattgttccatgccagaatactccaaccttcacctccctggccttttgtgctggaacaaggccaatcagttctgtctgctccttccagtggtgatttggtttaatcaaacaattgcatgtctgggagagttccctgtccgccttgattatacatgcatcacccttgccccgccttgcacatactccccaagtcacattcatccaatttcatttcattgcagataaaccacacacagaaatagacaatgcaatcaccacagcccgtgtctaggagaacatcttgtccaagcgcaggtgcaattttgcctccacttggccgtgtccttgctaccacctgtgtggtcttgggccctgcgtgggggagcaagagggcctggcctccttcctgtctcatctcactgttcttccacacacagcaggtagcgccctcccagccaccctccccatcaccgtcctctgatttgtgaggtgcctgacagggagccagggaagggctcactccgcaagcacagtctcccaaagtggcagcgtctcagcactttgcagagctggcatgatcgtttccgaaatgtccacccaggctctagggcagggtttcttagcctcggcgctattgacattttgtgcaggatgcttctgtgtcatggggctgtgctgtgcacggtaccccggcctctacccactcgatgccagtagcactccctctccagatatgataaccagaagcatctcttgacaaggctaaatgttccctggaagtcaaaatcgctgccagtggagacccattgagagacaggaaggtgcagacaaggcgtgactgaagagcaggtggtcagcccctgagaggccttgatggagcctatcaaagaccctgctcacctgacccctgacccctccgtgtgagctctgcccaggccttgctctcagccttggggtgctctgcatgcagaacccctcccgcctgcacctctgaggtggctcttcctctgcagggttgcttttggcacaggtggaggctctgactatggggacagggctccccctctgtcatgctcagcgctgtcccgtctaagtctcatcgctcatcaggaacacccaggcccttggctccctttaaagctggtgttgggcctcaatgaatgcctctctcttttggctggaagctccaatattattttcctctttttattggattatctttcttgaggtattcaaatgataagacaaaaaatatgtcaaagcctaggctgtcagctgcagggactggcagtcctccattcaggaggctgagcaggtgagggcttttgattaggaagctatcatgctctgattttttccagaatgatcacttatagatcaagtgaactaatctgtcccaatttgctcatcatgactttaggtctttatctgcatgtctaggctatccctgttcgatttacaaaaccaagaacaagaaaggttgaccttacagcccctatgaggccttgacccagacggccgcctataaaaacggcccactcattatgcggtcacccaaatggctcaaaggtataattggcacatttgactgcatattactcggccctttaaatatctcttctgatgtgttaaaattagcttcttcccaaccacaaaaagggaaaggagtgtcctttttaagcaaatatggggaaaaagctcctctttgtctggcttagttaaaaatgaccccatctaaagtcaagggtatgtactgggtgacctttcaaggcagcacccagacttaagatgtaagaattctcctttttcgattgaaaaaaatagactttcttgacacttcagagccatcatagcacaatgggaaccggagagagggaaggggcggaagggcagagaccccagctgtacaatgcccctgggtctaggcttgagcgaaggtgtgggagtgggaaggagaccatgtggctcacggtgcacagaaaggatttgatgtaactcagccctcctctgtcccccaggtgagtatcgtgtgtgctggcttctgtggataggggtacagcacacagggagtctcacctgggtcttcaatatgcttcatctccatttcactgcagacagacccaacctcaacctcaggggttaaacagttgccctgggtcccccagggtgcaacggaaagagcaggaattggaacccaagtctgtctgacccaagggccaagctcgttacagttttctggtactgaggttaagggaaaaatcaatcttgcttgattttcttccctgaccaaataaaagcccccaaagacctagagaattcatctgaggttataaaaataaagtaaaagacagccctttgggaacagtcctggtcttgaacttgagctggtgttattgctggtggaggtgcccacagttttcacttgtggactcaagctccttccctgacagcttgctgcagagagcccttcactgagaggatccaggtgatgcagcctccaaagtaggaatgggcaaggtgtgcacctggaggtgagaggccgctgtcctgggacaccggtggaaggaggtgctgaggaaggtcacaaaagacatgtttatttgacttcattaatatttgaagggtgagctctatgccccaagcagagaaaaaagaagtgaggaactattagcattttttatcatatttaatgggacaaacatctaaggggcagatgtcatagcggttaagaacacggatcttagagttaatcagattgggatcaagtgccaaatttgccagtttctggctgtgagactttggtcaagttactctaccttttcaagcctcagtttatgcatctgtaaagtgaggatgatggtaatcatatccattcactagagtgtgatgcctgatagctagtacacagagcataaaggagagctgggatctgtgcactcacggtcagaggttgtgttgtttcagctccgttctgttccctacttgatgtgtgacttttctttggtccctttgattacctaagcctcagtttcctcatctggaaaaaataaaaacaaaaaaggtcggggcagagggagaatcacttcccagtttggcaaagaaaggtagagatgatggaaaggaaacatttttgtaaactgcaaaatgctgtcaaaatagaagcagagattccagcgagacaggactgatgaatggctgggcattgtcaggcacctcctcgcaggaccctcaaaccattaaggacttgactttgctgtccccagttcttcctctgtctaagacgtgagattcagagatgaaaagtcagggcccactggaaagacgatggagggattcatactggctggaatagcatccaggctctctgttctttgtaatatctgggttatgggtggcatgaagaggaagctgggagaggtggcggcagtgcccaggaagttgacatagagaaggggtgggtggaggaggaggaggggaagagaggatcactttggatatcaggagattgattttggggtttggcaggtgggacatcaggaggatataaggtaattggggaagaaaggaaatttggagaagtgatgctttgggttatgaataggtttcccattaatgtctgtggagagaagcaagaaaagatggtaatttattgctaatcatttttagctgttggaatgtgtgtctttgaatgttattccatgcaaagactgggcactggtgtgcatttgtgcaaattgcaaaggtgttttaaacatcctctgcgaaatgagatatttcatcacggggcagacagtgttttgtagtccacagagtgtttttgaaagtatttttccctttgagtctcttccaagccctctgaaaaagatatggcatgaattattattattattgttattattattttgacagtgcctccctctgtcacccaggctggagtgcagtggcatgatttcggctcactgcaacttccgcctcctgggctcaagcgatcctccacctcagcctcttgagtagctgggactacaggtgcacacgaccatgcccggctaatttttgtatttttagtagagacagggtttcatcatgttggccagggtggtcttgaactcctgacctcaagtaatccacccacctcggcctcccaaaggaaattttataatgtcttcgtcctaagggttcacctttcctgcttgctcttagagtaggattctgaggccttggtcatgcacgttaagcctcagccattcactaactgttaagctttatgattgcctcaatcatttcatttatccatttagggaatgtacataagcactcccctgtgccatgcactgtgttgggcagtggaggtacagcatgcacggtcagacatagtttccagatgaagtaatatgtaaggagattatggaaggatgaacaggaagtagttacgaggacagtcaggaggcaggtggagggaggcatgcaaggcagaagcacccagtatgtcaaagcctggctcagaaaaacacggcaagtttgtggagatcttctcagatgtattgttttgttatcaagtgttcttttgcgtttcatatcttaaactgaatgtaaatggcatacagcccaccgtatctatctgcaataaattgcaaataattacatgttataagtaaaagttaccaagaggccacaagaagttgttttaatttattgttcattttaacccgattttcccaagtgtgtcattgatttttgaatttttaatattttttctggagttcatgttaagacataccagaagccagcaattctgttgttctattttactaaatattagttattttccaaataaattattggcaatgtatgttaacaaatattaagttgacaaagtaacttattgaactatcaccatatttttattcttaataaacttcatcaattacatggtacatatatgccattcaagatcgacattcttttagaatactacagagttatttccactttaaagcagagaaaattgaggcacaggatgattcaatgatttgcccctgtcctcctgccaataaagggtcaaactggaatcagaagtcagcttttctgatggaggctaactcctgtaaaatcgcatgtggagaaaggactcttgtgtttgacagtctaagggccttttctgcctaatctaaggtctgtttccctatatgcaggctgggaggggtgattgtgcagagggacccttggagaactgttacattatgcaaacttgattatcctgtctgacattattgatgtcagcagccattgtgaaatgaagtttgggagatggagtgtggaaggtggcacttgtaatttttaataatcatcctcttttacttcttggggggaggcagtgggggagaaacagagcttcagggttgtggatgctttaatggaatctgtctgtcacaataaggaagtagagaaagtcttttagcgttctacaggctaaatcacagggcttgaaccatggtgtttttggtgaacagagatgccgtaccataaaggcagatggagaatgactgcagggtcaatgagattgtcaccccccgcggcagggacaatgtttattcatctctgaaatcctagtgcccttcacagggcacttagctggagctggtccagtgagagctgattccaaatacactctataaaggaccttgtctgtgtagaattttggcatctcaggcactgtgatgaccactcctcccagttcaaaatctccatatccaactacctgatgaatttctccctttggatcccaaatgaccagaacaggacagataatgtccccttcaagaattttttatcttatgtgaagtccagtgaatggtgttactgtctacccagtcttccaagtaagtgtgacagcttggcatcatttttaaatttccattctcctttgccccacataccagatcattcaccaagcactgcctcttctattttctcatgatctcttgaatttgtccacttccctccatctctaccaacacctccttggaccatgccaacaccatttcttgcatctgcagtttcagcaatctcctaattggtcttcctgccatcaccttcattaatccattctccatgtagtagctggaatgacatctagttaacctttacttaaaacctccatggctcttgaggtcaaagttcaaactcattacatggcctaaggctttttggggtatgatcccaacgaatttctccatctgtctcccatcctgctccctgcctccctatcttcttccagttcctctaatgccacacttccccacacccagcctccactcatgctgtttcttctgccaagaacatccttccctgctcttgcctagccaaatcttgcttattttccatgtctcagtctcagttcttcagtggggacttccctgaataaccgtataagcaaacattaataaagttcttgctatgtgacagatacttgcctttacatagattaacctgttcaatcctcacaataaccctatgacatagataacatacggtctacagttagcagatggagaaactgaggcactaagagataaatgaacttgtccaaggttacatgcaaggtagaagagctgagattcaaatgcaagcgtcttggttccctagtctgtgttttaatcactacaccctgactccagactatgctgagttgtacctgctgtagcctggaattcacttccactgcacccctaatgcttatgcggcattattctcccttctatagttacagcatcacgtggacaggaactgtgtctgtcttgtccacgggtgtgtccgcagtacctgcacaatgcctagcatgtcacaggcactcatgaagatgttttctggttgaatgaataaaagattaaaattctccctaagcatatcagctgttggagccactcttgttcccagtgtgtttcagattcatttgggggcagagagcaaaagtgtctgcatgtggcaggtgagatgcccctatatgaggtgtttggatacagtcgtatgctgaagaagactttacctcttggttggtgtttccctacttccactcccaatatggatggcagccaagctttcattttgcaggtctaagcctctgtgtctagaaaacggaggttttagtgacttgtcttttgcaaaagtaagaattggcagacaccatggcagtgggcgtcctctcttgctgaggacaggaatggggctaggctgcagcatgcctgatgagaagctgctgtgggtggttgggcagttaggcactatttcccatggcctggagagcagctgagagggtcctgtgggtcactctgtactagaatggactgcagctaggggcgccctgagccctttccctggagctgagtgacagcttgagctcaggggaccagcatgtagagtagaagacttgggctgaggtcccgccctcgtggccccatctctgtggggtgtccactacgtgtgagtccaggcccttaaagataccatggggtcgggggagtaataatgaatgcagttgaatttgctgtctcttggatagtggcggttatttgcagatgaactttggcttaaagaaaataaagaatgtggcatgtctttcttcctaatgttgtgaataggaattcattccagctatgcttgttggcacacctcaagcacggtccagggctcaggaacatatcggtcttatgcagctcttggatgcttaccacaaaaggagggctggttgtgggtgagagccatggcagagtctggggcatggcaggtgcattgctgcaggatgagcctttgcgaagggctaggcttgctgctttggggcagctcccaggatggccaccagcagaaaaagctccaggcctggttccatgttctttctccggtccccacctttccttcctccacagcacattttaaagtctgatttcaggggcttgggaacgtccctctgccagatccacctgcatgcttgcgtcttgggatctgaccacagtcttcaaccttctgagggagtagttaccacctttttaggtcagggagtgggtgatggtgagaagggagcaaacaagcctcttgggagagagtgcagggaagtgcactgatgttttggagtaccttccattaccatcattgtgcttaacgtgttcgttacgaagcagcctggtgatgcttgcttctcctcctatgggtgactcctcctctgtccaacaggggagcctcacggtgggtgcctttgctcaaagaggacccatcctcagggagtttgcagccagccgaagggcagccaggagtgaagagtgaatggaaggtgaggcgggagaggaaaatccacctaagctgaacgtggcttcaataattaatagcagcgggcaaagccgacattacattaggaaaatttaattagaacatgcaacttatatatgtaattggatgcctggggcagtaataatgcattttcacagtacctcaaccatccccccaggcttgttttgactcataaaaagggatcagtcatgaagagctgtgatgctggagtgttatttctgttgtcctggtggtcacttacgtaacctagtgtgtagcctggggcaggctgtagcacctagtaggtaggtcctcagttgatatttgttgactgatttaatgggattttatgatgagattgaataaatgagggcacacctggtttttaggacttccctggatggctccatgcttcctcctggaccaagtgtgttcagatgagaatggcccttccttgctgtgggcaccctctttgctagggtgccaaggtcggagctgatattggttatctcatcgggccttgcagcagcgccgcagatattctgcctcccattttgcccgcggggacgccgaggcccggcgccgcatcctgccgcccgttttgcccgcggggaagccgaggcccgatgccgtaccctgccgcccgttttgcccgcggggaagccgaggcccggcgccgcatcctgccgcccgttttgcccgcggggaagccgaggcccggcgccgtatcctgccgcccgttttacccgcgaggaagccgaggcccggcgccgtatcgtgccgcccgttttgcccgcggggaagccgaggcccggcgccgtatcctgtggccgttttacccgcgggaaagtcgaggcccggcgccgtatcctgccgcccgttttacccgcgaggaagccgaggcccggcgccgtatcctgccgcccgttttacccgcggagacgccgaggcccgatgccgtatcctgccgcccgttttacccgcgggaaagccgaggcccggtgctgtattctgccgcccattttacccgcggggaagctgaggcccagtgctgtttaatatcttactcatgttcacttgatgagaaagtgacagatctgagacaaacccaggtatgaggctgcagagccctgctctgaaccgctgagtctgtctcttttcttgggacagggacagcttcctgtggtgacagccttgctcttggctgcagggattaagggaggaataaagctcggggctacagccagcccatccgggatggggagctaccacagggcagcaggtttagctctcactgcttttctgacctgagtatgcctagagaggggagctcagagccatggaggagcaaggagagccttgggtcctacagcggctaccagacctctgcgtgcagttctcgccctgggcaagccctctgtgtgggtgggtgggtgggtgggtgctgccaggacaggcctctgggaagacgtggaacactgacggaaggagggaggagggcagaagccagggtgtttgctcctctctcccgtggcctgggatgggggtctcgtgcactgatgtgtttccctcaccactcccgtggcacagcccctccccctttcttccccgctccagccagcacacccctgacttgactccaccttcagcaggatggccttggcgtctgtgtcctggcaatgtcaccctcctctcatttcttctttagttctagaggttatgacaccagccatggaagagcagagaggccaatgaggtggggaggttggaaacaaaaggccttctccaccccagcttgaccaacccaaaagctggaaggcaaggaagacctaggtgggttctgtttccctgaatagaccttgactcatggaccctccatatggccagaaggtgacccaggcctgttaatcaaaggcccgcactgccctctttgcagccactgattcagggtagggcatgtgggttaatgaagccaatcatgagcaatgggactgagctctgagtgttttgagtgttttggttgaattgagtaggggctgcctctctctgtccacttccatgttgtgacatggtgacaaggagctgaggcagagcagcgtccctgcaatgctaccagaacaaggctggttctgaaggcagagctcctctccctaactttgctgatatgcaagcaaataacttcctttttaaacagaagccagtagccagtttgcatgggattttatcacctgtaacagaagagtctttttttttttttttttttttttttttgatggagtcttgctctgtagcccaggctggagtgcagtggtgcaatttcagctcactgcaacctccgcctttcaggtcctgattcgagcaattctcctgcctcagactcctgagtagctgggattacaggcacacgccaccatgcccagctaatttttgtatttttagtagagacggggtttcaccatgttggccagactggtcttgagctcctgaccttgtgatccgcccacctcagcctcccaaagtgctgggattacaggcctgagccgctgtagcagcagaagagtcttaacagatattgttcacttcctcacagtaggagtcacccaggcaatgggatgatgtgggaagggcatgcgatgctctcaggtgaaactggtcctgtgcccacatctcgcgttaatttgttaactgaccttgagcaatccacttccttctgtggacctcatctcccaccctctcctgtaaaacgagaggggggctctccttccttccccagtcagcagccctacaatctacaatggcaggaacgtgtgagtgctcctgctgccacccccgctcagcttcgatggtgccccgttgtccaccacacagctcttcttagatgccctttttaaaatgaaatgcttgcacttagccacacgtatcttacaaggaacaaattcattgatggttgcatttcttagggactggacaacagtgtgtcataggcctggaatctgaggaaagggggagaaatgcaaaaaggtgcaaaaaaggtgcaaaaagggccactagacttgaccagcctcaccgttttcacagaaactagactgaacaaaaagaaagtgctcactggcctgatagaagacacgcactgttatcatcaataagaatggacttatgtattgctaatgtttactatgcaattaacaatttccgttgactgtgtgaagcatcttaagtgcattttaaatttgctcctcccaaaagggtacatgggcactgtctttatcctcaagtcacagatgagaaaatggagccccagtcaggtattaattaattactcaaggtcacaaagagagaagccaggtgccccagcaaatcgaccctgaaggcagagtccctgcccttcatcctcctcctcttcttggggattttcactgacttggaaacattctcctctgctcctgaggatggcctgagtttatcagaatgggtgtatattggcaattctcctaacatttgctgaatcttcatcaaagatgccaatactgtctgtcaagcctgcagttccagtgtggcccctctgccaccgcgcattctcctcggttcactttcaattgccttttaatgggagagagataaagtgaaattacagccttgggtagcttcttacttgggaggctaggaacagcccggccctgtgcatcacttactaaagctgcatttacagtcccgagagcgaagggacagatcgcaaatcagatcatttattgctgctgctagctcagcgaggagaacattcccaaggtgagagaggtggaggctctgtccgtgagtaaaacagtttgtgtgtcctgggctctggaatcccacccatcccctggtgggtcattttaagtggtaaacttcccaggagctgcttcagcagaatctgagcggagagccttggagtgctgagaagaacacgtgatttggaggtggggtctgaatcttgagtcctagtgctcattggctaccaaatgcttattgatgaaatgtaatttcagaggaaccttcttctgccatttaaaaacagaaatttaagggaaggactctgctaactcctccaggttctaagaggaggagcatatggcagttctgagcagacactttggaatctggcagagccaagttcagctcctggctccctgacttataagctgagacctttgctggacctcactcagattcttctactgcaaattcgtcttgtgatatcaacaaaggcatttacatgtgcccctagcacagagcctggcatccagaagtgttccataagcagcagcagttattgtgatgattattactgtgactattattaagagtttgccattctgcaaatagttgccttttttccattcctttagcaccaggtgcctttgggccaccagctgcccttcagcaagcactgctcaagggttccaggagttgcaagcagccctcattctctttggttcactttcaattgccttttaatgggagagagataaagtgaaattacagccttgggtagctgcttacttgggaggctgggaacagcccggccctgtgcatcacatactaaagctgcatttacagtcccaagagcaaagggacagatcacaaatcagatcatttattgctgctgctagctcagcgaggataacattcccaaggggagagaggtggaggctctggccgtgagtgtaacagtttggtcccagggctcctgaggatcatactgggcaatgctagcgatattggctgaggagagcagtaaacgatgacccacagaagcttgctctctcttctctctctgtgttgtatctctctatattttgctcatccatcaatctatgtgtgagatggggaggctctctgaccaatagtcttcaaaaataaaatgcaatttgccaaacaaacaaaaatgactgaagtatatgaaaaggccccaggcttcctgcagtatgtgtgaccttctgggctctcctagttttcttgtgggggaagatatcttaggggaagcaaaactgttctcctccaagctccaagggacctattgcaggaggttccttgctttatttcctggtaggatctggccattgagtcactgagagaccgtggagtcttcatagaccaagaccattctcttcatcaaagtctccctattcctgttggtgagcatggggcttgggacaacacatagtgcattccagtagaaagtatttactgagtaatttttgtgagtcattattgaacaagtggtgtattcagaattcagaaaatgttgtaggtcccttcactgtccccctgtatgttctgtatgttatacttgtcttatgtatgatatctacatagggtgaagacccatcagaggttataattgttattttccaacatccagcagattttttaaaactcaggaggggaactgggctgggcaccatggctcacgcctgtaatcccagcactttgggaggctgaagccagtggatcacttgagctcaggagttcaagatcagcctgggcaacatggtgaaacccacatctctacaaaaaatacaaaaattatcccggtgtggtggcatgcacctctagtcccagctacttaggaggctgaggtggaaggatcatttgatcctgggaggttgaggctgcagtgagccatgatggtgccactgcattcaagcgtgggtgacagagcgagaccgtgtctcaaaacaagcaaacaaacaaacaaacaaacaaataaacctcaggaggagaacaatctgttatacttactcagattgttaccatttctgttgcttcttcattcctgattcttcaagtttccttctttttgaagaacttcctttagtacttcttgaagtacatgtttgctggcaataaattctcttagttttccttcatctgaaaacatctttattttgcctttattctggaagtgtattttctctggataaatcctggtttgaacatcctttcctttcagcacttcaaaggtggtgtgccatttccttctgacctccatattttctgatgagaaatctgtagtcattcagatcattgttctcctacaggttaaatagattgcatttccctgtcagtttcaagattattattattagttactttaattttcaccattttgattacaaaatagtgaaatatttgattacaatttgaatacaaaatagtctgggtgtggatttctttgggtttatcacctttggagtttgctgaacttcttaatttgcaggcttatatcttttgtgaaatttgggaagtttttggccatcatttcattacatattttttcagccctgcactctttctcctctatttctgaaactccaatgactagaaaggaggcatctcctccttcagaattttggctcttgtgggaacctatttctgccactgattattgcttgggggctgagagaatggaaaaaagaaaaatgtggggatttctgcactctctcagagtcctaggagtttgctttctcactccccaagccagaccagaggcctccccactgatttctctgtctgagtcctgatgcccatgtccaggtctcaggctgtgctggtatcaggctcgggggtccagaaggagaagaatggcgagcctgctgcccactcagtggcacttcacattctggtcttcttctggatttgcctgccactgtctactttcagagctcacaaatagtgctccatgcaattttgcccagcttttattgttacactcactgggagagacagggtagagccctgccttacccagggttcttgcctggttcacttttaatacaaaacctatccatgcccaatgtaaagtcaagctcaaatgacacagaagtaagtagagtaacaggaaaaaaagaggtcattttttgccatctcgccccctaaggatagggcctgttgatgcttttgtatgattttccagacttttctctcatgcacatgctggcatccttgcagggagcagtctggcctctgatggtcaggggtgcaggctgtaaacaccagaacggcaggttcctgaatcagtgcctataactctggcaaacaacctaacttcaccaagtccaaattcccactgatgtaaagtgggaatcataatgcctgcccctcaaggaagttctgagggtaagaggagcaaaggcacattgtagttgcctaatgaatgtctccatgtcatctgatctatacatagagagagcacatgctcatttctgggtatggagacagacatcgcttgctgcgataaaaccacagacggttgctcttctctccctctgctttgtcttggccatctctccacattagtagataagattgtcttactctctgggacggctccaggtgacattgttgcatggacatgaagtcgcttattttctctgttgccttggaaaccccatttcctgagagtcttgccctctgttctccctctgacaacagaggggcaacccttcatcctctgtgtgtccccacgcttttcgataagcaggggtcattgggaagaagccacaggagagtggggccaacaacccccgagagagcttgccattctctgttttaattcattgaggttcttggctgatgctgtctggattggagggaagggattcatgtaagtgtacattaaggattctaagatgtgtgtgttacataaactgcagggcaggtattgattggtttgcttccaagagtgtggggcatcatctttttcctggaccagaaatgactccctgtggggggttcttgttcattccaggagaagggttgaggtccttgatggcttttctggggtgcttaccaggggtgccctggtgagtgaggggcacttaccaccaggaggtgttcagagacttggcattaagtaaccatccacacagtaaacgttcgttcttcctcttcagttccattcagtcctgagagcctcagagagtgtctcagactggggctcagccgcctctgtggctcttgccattttctctttcttaacagggagaatggaccagaggcccagaggtgttgacagctgcagtacctcagcagaatataataatattcattgattttcatggtattcctttttttgattgttttctatttgtggcaagtttcatttttaagtgtatttattttcatttgaaagctgagataatttgaagaaaaatatgaagtaaacaatgtggtcctggtgatatgcgtgtagggtatgattcatataggggttccctagacgatttaagtttggcaaacattgaactaacatgtgaatgactgatagcagggctttccctgagaacaagctcacaaggtagatgggaagactatgggcaaatgggcgcaagaatgctgtccatagatggggggaaatctccatcagttttatgcattttctgggagttgaccctttctgcagactatctgctaaggtgggagaagaggaaggacacaagccagggcagggggtggactggacaggtgatggtggcagacagactgctggctttgctgtcttgtgggaaacagactggataggaagaggctcacactctcccgagggagacaaagtctttcgtagcaggtatccgtgattctattctgtctgggacgcattccccaatttctggagggtgatcctctattttatctcaggggaatatcccttctccactcttagtccatgtggtgcacacatcacccagctcaggcaagctcacatattctaaacccttggcctctgtgattggtgtaaggctgggctccttgcccaacagggtcccatgaggataaagtcagcaatgctgaatggctttctgccagggttgctaagctagtgggggcaggtgaggagctctctgtgaacagaaggtcctgagattgaagccaccacctaggaaggaggaactgacagaaggagaaaggtcgagtcccaggcatctccttggagattctgggcacaactgggacaagagccctcgtttgcgtgagccagtgagtcccttgcattcccatcttattctctgaaactgatttgagttgagtttttgttatgagccactccaagtcacatgtacctactgacctacgtggagactctctcgtgctctgcatggctgtagccatagctccgcagtcagagaaacaggcactggagttgggacctggactcccattgcagctcagccatgtatgggccacaggaccttgagcaaatcatttctccggttgatgggagggtgaagtgagggaatccatgctaagctcctagtaaaatgccggcatagacgctccgggtggatgtgagctgctgctgataatgatggtgattaaaataaaacctcaattataatgaaatgtaattcccatgcgaatgctgttgctcccttccccacggtgaagtgtgtgtgtgtgtgtgtgtgtgtgtgtgtgtgcgtgcccacgtgtgcgtgtgggggagggggcttggaattgtggcatctacaatgccaggagaagctttcataagcctaaggctgtagtccttgttcaggggtggaaagatgcctccagtcggtccaatctgagtgacacccacgtctttggtaagcagctgggaaagaaaagctctgtctccttccagatggtgtgctgcattcccatggttttggatcctgcaaccactcttgttccacgcagaggccagcctgtgggttagagagatgcacagagagggacaaagcccggaacaatcacagagaatcaaagcactctggttataccttgccttccctaagctgctgatgaattagcagatcaaattccagaaataattcaaccttccactgttttttttttttcacgcacgtgtccctttgccaggcagccttgctgtagtgcctctgtttaatattccatttgtaagatgggcagctccaagtctatgctcactcagctgctcatcaagaataacaaggtaaatgacaaaggaggtaagaatgtcctcgtcaaatgtcctatgctgtcacctgccagaaagccctcggcagtcagtgtccaagatggctccccacgcaggaatctctctgaagtgctctgtgatctccacaactaaaacataatttctggctccagagagctctggggctctgttcccttgttcagcccgtgctcctggtcatcgtcagccccaggactgaggcttggactggctcaggggctgctgtctgtgaaaatcagattgatgcatctgattacatggcctgttaacatctgcaaaaaataagataaaataagaattatttacctgtcacagctttgacacaccatcacaaactggagctgacacctcttctgttcaccttggagaggtgcagagtgaagagcagaccgtgacacacttaatagattgctgggcatttacggagctgcttgttacccagctcaagagccatgtccaactgctacagcgttcatcaaagacaagaagccacaaggagcaagtcagtactgcaattcattaaggcaacttgacctctggggagaggagaagaaaaaggaactagcagcattgattgcctatgtttcctgaagtgtggtgtcatggcataaaatgacattgaatcacagggtgagaaaaccacgcatttcagctcttgcttggcctttgaagacgacataggaagtctctgctggtgctagttgtcttgagcttctctttgacaccctttcctaatgcaaacagagtgggcctcagcatgggagcttctgcaggtgactctgctaaaaggttactaacactgtatagtggtgttccatccatttaaaaaatatactttaatttttagagtagttttaggtacacagtaaaattaggtgggaagtgcaaagatttctcatttacctcctgcccccacctacacacaacctcctccattatcaagattccccctagggtggtacatttgttgtaattgatgacctgacattgacagatggatgacatatagtttgcattagggctcacccttggtgtcatacattctatgggtttggacaaatgcaaaatcacatatatcccccattacaagatcctacagaacactctcactgacctaaaaatcctctgggctctgccattcatccttccatccctgtagtccctggcaatcactggtctttttattgtccccataattttgcctttttcaaaatgtcatacagttggaatcacacaatacaaagcctcttcagattggcttctttcacttagcaatgtgagtttctgtcttctccactgtcttttcatgattggatagctaatctttgtttcatctatttttaaggttatgcaccagttaagggaagtggtataagttttccgtgtataggagtgatatatagttttcatgttctttgatttgaaaattaacttcctttaaatatataattgctttgtttatttttggccagataggacactcactcagctcaaaaatcaatgtaaatcaaaaggtttgtattgaaaactctgcctgccatctgtctcctgccacccagctcctacccacactgtgttaccactgacttctgttcatccttccaaagagtttatgcaaatacaacctgttataaatatatgttctccctcaacagttttctacacaaatggtagcatactttatgaactgttctgtatctttttggcataacagtataccctggtgatcattccctatctgtatatttcctcattctttttttctgctgtatagaattccattttctggatgtaccacagttcattcaaccatcccctactaatggacacttaaggtgctgtggtctttgatgctgtaaacagagtagctgggaatagcttgtacttacatcgacccacatgcataggagcatatctgggaagtggcgttgctaagtaaaagagaacattaacttctaattttggcagacattgtcaaattgccctccctaaggaagtcatagttttttaattgttaaatggtcttattatttgtagatcgacagaaaagaaatgagtcaacgatggtgcaggtgatctgtgcagtgctgtgcaggggatgggtcaaagctgtgatgctggcatgcaactaactcaccattgtgagccaatcacaaaagcagaaacttggccaagctggtatctttctagaaacaaacttcagatgtttacatctgtaacaaagacaaacttcagatgtttaatttttatttatttatttatttagttttatactttaagttttagggtacatgtgcacaatgtgcaggttagttacatatgtatacatgtgccatgctggtgcgctgcacccactaactcgtcatctagcattaggtatatctcccaatgctatccctccccgctcccgccaccccacaacagtccccagagtgtgatgttccccttcctgtgtccatgtgttctcattgttcaattcccacctatgagtgagaacatgcagtgtttggttttttgttcttgcgatagtttactgagaatgatgatttccaatttcatccatgtccctacaaaggacatgaactcatcattttttatggctgcatagtattccatggtgtatatgtgccacattttcttaatccagtctatcattgttggacatttgggttggttccaagtctttgctattgtgaataatgccgcaataaacatatgtgtgcatgtgtctttatagcagcatgatttatagtcctttgggtatattcctcagggatctagaactagaaataccatttgacccagatgtttaatttttaaatggaccagtagaagtggaaaggagggacatgtatgtctatactctgggagagatgacagatgccctcatttgcccccaaattggtgcatgagggcagggctggggttgggctttgggtgctgcatcttgcaccccttaatgggtgtgaagggtcccaggtgctcaggtggggctggccacgtctccaggggacttctgtttcctgcttgtcttgctggaggccggctgctttgtcttcttcaattccttgacattcctgatattaagccccttcttgggccagtgtgagtgggcttcctcccttctaaagatcagcccgccctgagacactcgctgtttctccctaggtggaagcaccctcagtgggtgatgctagaaatacctgcccgtcatttctacttctactggtcccattttaaaaattaaaaatctgaagtttgtctttattacctttctagaaagggaccagcttgacgaagcttctgcttttgtgactgtctcctaatggtgagtattgagaatttcttcttatagtcgcagcagtgaaaaggaacttttcatccaaaaattacaaaacagatttatgttgaaaataatgagaactttgttggtgccctggaaaaatatttgagagaagcagagagtgattccttttattgggccagagtgtaaaattcagctcattggtctcaagggaagaaaaagttcttttcttcagttggcaatttgttttcaacaaaagatttggaatgcctttttcttttcttttcttttcttttcttttcttttcttttctttttaataaaggaaggatatagttagttgaccaggaattagctagggattaagaattggttggcttggcaatatttctacctgcttgctgtgcatatacttgaattaacaacggtcaataatcaaaagggcattagaatgtgagttgggctgtggagggaccaccccaaatctacttctctgtagtattgaacccaggggcctcactttgcttcgctgcaattctgtggtttttaatttatcatttccaggatctgggggtttcttcaagctcccagacttgctcaggcacattgcaaatagccatgatttgagatgattttctttaatgctgaagcagatgaagaacccaggttctttttagtggcaaggcttgtttatcagcagctatacagctatgggcacagacacaggtaaacagcacagatgctgggagagggctggcatctgaccgtgaccatcacgcccatgtgacaaaggatgtcaccacagtgaacagttctgaccacagtggcttttcacctgcttcgttaaatttaactcacaccggctcagaggacaatttgattcattctgtatctcagcagaaaccagagcacctcagaagatcaaggcttccaaattctcctgggggaacagacgtcagccattcagcacaaaggaaacttccttctctgtatgtcagaggaagacataattgtgccatttccttcttgaagaagtttacaaacatttgcaagttgtcaaaaataattagtctaaaattgtttcataaaccgtggaatgaaacaggacgtgccttgttgagatcaaagggcttctgttaccttcttgtaaactcaaatgaaattcttttgaaagtaaactcttggaattagcagtggtttttgtggcacatgtatggcagggggaggggagcagaatgattcagatagcagagtccaggggagagccgggaggagtaaagccctgtccacagagaatgggaatgggtcttgaacagccatggtgatctgtgccagtgggcacaggacttcttcaacgggaagctcaggcattcaggaaacactcatttcggtgatcttgaacttgcaagagtgagagtgggcatggacactcacagttctacaaacaaagtaagaactggggcttgtgagtcagtcagactgagtttccattccagcaccgccggctcctacaagcaggccctggagaagccacttcacctccgcgtctcaggccactcacctccaaagacagatgcaaactccgcctccctcctcggtgagaggtaagtgaggtgttgcctgtggggggctcagttcagtgcccagccccgaataagctctggggaatggccgctctgatacttatgattgttcctcattattaggatggaaacaagcaggcatttaccgagggcttatcggtggcagatgctagagggggcctgggacctcgttgagaaatgcagaggtgtgcatcctctccctcaggggaggttggataggagtccagctcctaacataaccgcacggggcatcagccccacggaatgcagctgttgtgtggccaggtcctttgggcacggtgcccatagaactgagcctggtggcctggtgagcaagtgggagggcatgtgaaggcggtggtgagaaagcagaagcctggggggctcctgtgagccctgcttgaagggtcagtaggggagaaagtgagatggtggagatggtgaagagttgcttgttgagaggaagcagataaaacggagctaaatagctgcagttttccctctgtctgtgtgtgtatatctgtgtgtcctgcccttccaaggaggagagagaggacaagcagggatgagaggagagaatcaggctggactgtcagtcttttctcccctggagaccttcagggtagcaggctacaggcctgaagctggcctgaggccctggctgtaggacacgctgtgtggaggagagcaggtaggggagagaaacagcatctctcctatgtgtgctgccatgcaggggccctcagagagggcgcttgggagacagaagcatcccacaccactctcaggttgcaaggaccctgctgagaagggaaaggtggcccctgacaagcacaggtggacacagcctgcacacagtggcctgtcctccccacattgcattactctgtctgctggagtcatggctcagtgagctaagggcagggatgtacatttctgaccctgtaaatcatatatttgctgtcacacagggcaacatttatccttttaatacagagtctatccctttctcaattaaacaataatactttttaccagatttagacaaacttcatctgctgagtcatcagatatttacagaacacttactctgtgctgggtcctctgtgaggtgcagagaggagagcggtgaggaagcgagtccctgctgccctcatggggctcacagtgcaaactccagcttgcaggccaaatctggcccactgcctgatactgtaaataaagttttattggcacacggccacacccacttgcttatatagtctctgtggcagctttcaggctgcagtggcagagtttagcaggtctgacagcgatcatctggcccacaaagccagaaacaattactctctggtcctttacagaaaaagtttgctggcccctggtctacacctcccctgtccaaaagaaatataaaatgagttatgtgcctaagttgatgttttctagtagccacattaaaaaaaatagaatgaaaccagtaatgctagtttcattaatatttatgtaacccgatatgtccaaaatattatcatttcaacatatcatcaatataagaatataaatgagttattttgctttttttgtaaactcttagaaatctgatgtggattttacacttaaagtcgatctcagttgggataagtcccatttcaagaacgcagtggcacatgtggtgggtttctgctagggcagagctcagaggagggccattatataaatcactgcacacatgggacccccagtgaggaacttggacacatactgagagcctagagtaggcccggcaccaggtactcatcgccctggaattctgtggagtaggggcgagtgtccttctgattttctcatgaggaagcagaggcgtaaagaggtttaaaagcctgtcccaggagaagcaggggccagctggggggcatagaaagggagctgggacccagcttgaggaggtggggaggcctccggggtagtagcatcattctttccaaccataaaacatgcagcctgggcttccttcttgaagttgtaggtcctggagcgtattcactttgcatagagatcatttgaaaaatgaaaatgaaaagcaaattgcatccacggtgtgccttcatgtactcatcattgttttaaagcagggagaaacaagctgtggcctcttcatgttcactcacagatgctgcaggtggcttaactagcagagtggagtggctcttcaagccgctaaaccagccactacttgcattcaaggaaggtatttcgatggattgaaagcattttctaaatcactaaggtttgcttttcaagtagcagaaagcttacccccgattgcttcaaaccattaatacgctgggaaaaaatgtgtgtgagccaccgtagcaggcacgttgtactctccccattcctctgtctgacagccggtgtgagttagtgctcatcaagtaacccatatggttgcagaatccacccatggtcagcactgaccctgaaccgggagctggacacattggtctagtccgggtgggttgcacagccctgcgctcagaagggccctgcactccactgaattctctgcagttctgacctgagatgctcagcaccttttcaacaaggacccacattttcattctgctctgggatggcaagttctgtagcaggtcctgcatccagtctgtcctgctgcccctcactggtggggtcactttgggcaccatgtccagcttgtcacacctcagatgagaaccacacagtgctgggtgttgtgagcacttgtggaagtgacaggaagggcttggtgtggtccttagtgcacagcaaacagctgggaagtggtgagggcatgatgacacatggtccgccttggagtatggcactgaagggggagctgggctgagatgctgtgttagtctggttttcactgctataaaggcgaacctgaggcggggtaatttataaagagaagaggtttatttggctcacagttctgcaggccgtacaggaagcatgccactgacatttgcttctggtgaggcctcagaaagtttacaatcatggtgaaaggaaaaggggagcaggtgtgtcccatgtgagagggagagcaggagagagagaaggaggtgccaggctccctgaaacaaacagctctcactcacgcgaactaacagtgagaattcattcattaccgtgggggaggtcaccaagccattcatgagggagctgctttcatgacccaaacacctcccaccaggccccaccgccaacactggggatcacatttcaacatgagatttggaaaggactcacaatccaaaccatgtcagatgggctctccatgccagactcctcaccagcccaaaccaggccccagctcagccaggctgattctccctctggccctgaaggactctgattgctttacccactcccacctccagaatgccactgcagcctctaccctctgcctggggatttttcaagatctctaccactcaccggcaacatttgcacaacagacgatttcctttgttgtgcaaacgtgatcacaagctccttggggcttaaaactccctgggactttaagttttcctcaagagaaatgacaacttttttttttttttttttttttggtgatgaagtctctctctgtcgcccaggctggagtgcagtggggtgatctctgctcactgcaacttccacctcctgggttcaagtggtttccttgcctcggcctcctgtgtaagagaaatgacatcattttaaacatggtttgtaaagcccaaccgaaggtgcctcctcctccacactcatgtctctctccctaactctctgtgttccagacagactggatttccttttgttgccttccttgcccagggccttcatgcatgtctatctttgatgactctcacttcatctaaggcttcttcggaaactgctctcttttcagaagcctcgtttcagaagctgcatttagcctccgacacatggccacaaccctctgcatctttctctccaccactcctcatatctgtcttccctacagggctccaggaagacagagccatggggctaaacctgccagtgctgcttcctcagtgcttggcacataatagctgctcaataaacatttatttcatcactgagaaatgatggcttgagatctcagtaatgtaggagctacccacaatgtcatttttttttttgagagagtcttgctctgttgcccaggctggagtacagtggcataatcataactggctgtaacctcaacctcctagattcaagtgatcctcccacctcagcctctcaagtagttgggtctacagctgcatgccagtacccttgggtgatttttaatttttttgtagaaacagtgtctcagtatgttgtccaaggtagtgttaaactcctggcttctagcagtcctcctgccttgctctcccacagttttgggactacaagcctgagacactgtgcttagccaactcaccatgtcttttaaacattcaactttcagttaaagggaacactcaagacatgttatgaggctgggcatagtggctcacgcctgtaatcccagcactgtgggaggccgaggtgggcggatcactttcggtcaggagtttgagaccagcctggctaacgttgtgaaaccctgtctctactaaaaatacgaaaattagctgggtgtggtggcacatctgtaatcccagctactcaggaggctgaggcagaattgcttgaacccacgaagtggaggttgcagtgagctgagatcgtgccactgcactccagcctgggcgacaaagggagactccatctcaaaaaaaaaaaaaaaaaaaaaagacatgttacggtgatcatatgaaaatggacaggaaaagtgatacccccgctcaccaggggacctgaggcagaaaatcaaccactctgagcctgttaacatcattggcgacagggaacccagggtgcctggaatggccatcgcgcacattctcaaaccttcaggaaccactggcagcagcagggatgagtctcatcgtgttttatttaatgctggtgtcacggagttacttatggccaaatacctcaagacaaattgtgcattttggaatttaaaatacctttcctttccagtgtaaaaccaacacatccttattcgagttctgcagcatttgaatttttatgtatcctgtaaaactgaaagcccctccaataatccccgcaatcctccagcaacattttcaccatagatctatgctagcagcaggttgttaacgtattttacaaaatgagatcaaactataacattcttgtacagcttgctttttaaacttatcaacgaatcatgggttccttcctatgggagtacttaccaacctcattctttttaagttttctctgttactcaggacaatgaaatgaccattgtttacttaaccagtcctctgttgatggagatatggttgtttccaatttttcattattataaaccatgctgcaaagaccattaaaaaagttttcgcataattgagtgagggattctgcagggtaaatttcttcctggaaatataattcatgggcaaatggcacaaacattttaagtattaattgacatcgccaaactgccatccacacaaacttgggcaaaatgtacacttttaatgatctgtggaaacttctaccagggaggatgcttttcagtggaagtggcagaaaatctaaatcaaaccagtttaaacaaacaaaattgtattggatcacataatggggaagtttgttataagggcataaaggatgcgatcagagcctggttctctctggctccctgcttagctcttctgcgtgctgtgtgtgtcttccttccaggcaagttctttcctcacggtcacaggaaggctgccagcagaagctgggccacaggctccaaggtccacatgaggagaatacagcttcccagcattcctggcgcaagccctgggagtcactctgattggacgtctttgggtcacatgctcaccattgaaccaatcaatatggctgcgaattgcaacgtaggggttgggtgagctcagggtcacatgatcttgcatttagggatggatgtcgcctttgtccacaccttgtggaggagatggggagactggcccgacttcttgagtgtgtggcctgggtggctgcatggggtccctgttctcagaagggccctgttcttagtttaattttctgctgtcaccatcttacaaattcttaatagttgttgaacaaggggccccacattttcattttgcaccaggacccacaaatcgcacagcctagttgctagatgacaatggggctgtttctagaaaaaggggaagatagctgagctgggaaaatgtgaatgtcctctgcaatggtctgtgctaacatgattcagatggagtttctccttgagtggttttgtcacttgccctctctagtccttttagttcttttccctctacattaaatggcagggttgggtgaggtggcctccaaggatgtttcggctgtgctcttctctgatttatgatgtctgcctcacttatgctatgaaaatcccaaccttgcaccaagtttatggacatggtgatattcttcaacataagttgcctcaattgtatcggtattaaaaagtgaccatgaattacagtcaagtgctgcacagtgatgtttgagtcattgacagaccctgtataccacagttgtcccataggattataatggagctgaaaaatgtctatcgcctagtgacatggaagctgccgtaacatcatagcacagcacattcctcacgtgtttgtggtgagctggtttaaacctactgcactgccagttggagaaaagtctagcacatacaattgtgtatagtacgtaatactagataataaatgactgtgttactggtttatatgtttactatactatagttttaatcattaatttagagtgtattccttctacttactaaaaaaaaaacaatttaactgtaaaacagcctcaggcaggtattttggggaggatttctagaagaaggcattgttcccatgggagatgacagctccaagcctgtttagcctctgatgaccgtccagtgggacaaggtgtggggtggaaggcggtgacattgatgatcctgaccctgtgcaggcctaggctaatatgtgtgtttgtgccttagtttttaacgaactaagagcgaaaacaaaaccaaccttgtcttttacagaagaaagcttatagaataaggatgtaaagaaattatttttatacagttaaaatgtgttttaaggtgttattacaaaaagttaaaaaaataaaaagtttataaagtaaaacatttacagtaagctaatgttaattttttattgaagaaaaaattttttctttttttgaaagagagtctctgttgcccaggctggagtgcagtggcacaatcttggctcactgcaacctctgcctcctgggttcaagcaattctcgtgcctcagcttcccaagtagctgggattacaggagtgtgacaccacacctggctgatttttgtagttttattagagatggggtttcactatgttggccaggctggtctcaaattcctaaactcaagtgatctgcctacctctgcctcccaaagtgctgggattacaggtgtgagccactgtgcctggcctgaagaaagaaaaatgaatttaaatggattcagtaaaacctaggtgtacagtgtttatagagtatacacagtgaacagtgatgtcctgggctttcacattcactcaccactcactcactgactcacccagagcaacttccagtcctgcaagctccgttcatagtaagtgccctatacaggtgggccattttctatcttttataccatatgtttactgtaccttttctatgtttagatacacaaatactgttgtgttacagttgcttacagtactcagtacagtcctgctgtacagcactcagtatagtcacaggctgtgcaggtttacagcccaggagcaaggggctgcccacatagctcaggtgcgtagcaggctgtaacctccaggttcgttcagttctctctatgaggctcccacaggaggaaacggcctaaggatgcatttctcagaaggtatcccagtcgttaggggacgtatgactgtaaaagaaaagaacccagcttcaagaatcaggaaactgcattgatgagtctcaacttgattcatctcttaacaaccaccagtgtcatggagaatttccaataagaaaatcccaaggttttgggaaatgctctttgaagatttttgtaaattggtaacagcttggtgtcatggattagacatattttcatagtttgctttcttttttacaagtaacccaattattttcgtctaattgaggaacacagcagacacttaatgacatctaagtatttctgacgtgcttctttccttttcatcctcataaatgatccgatccatacattttggagaaaattatgaggttggtgccaaagtaattacggttttggccattatgttcaatgacaacaaccacaattacttttgcaccaacctaagtatattatggctcacattccaaaaaagtgattaacatttaatttagttatcaatacatgaatacactcttttgtaaaaaaaaaaaaaaaaaggaaatggaagcattccagataaaggcaaagtccttttggatcaaacgtctccccgctcctgttctctgtgatcccttctcaggcctcaccccttctgaggtgaccatctccatcagttctttgtctccttccggaatgtttccatgtgtttgtattatagatatagctagctagctagattcccacagaatatctatcaagtggttttgttttgacctaaaaggcctcatcgttggccctctctttccccccttcaacatagctttgtgaattttccggtaattccgtgcagacctgcaggagagtttgtgctgtggaaatattgctcattttatacagcctcgatgggtctctaggttgatttatggttttcacaagaagtgctgtgatgaacagccttgtgtgtgcccgtgggggcaaggtaccaccctctgcctcagtgagggtgctgaggaggggtagaggccagagggcatccctgtgaggccgactgtgacagggtttatggggctgttctcagggtcacactgccagggaagtggaggcagtgaggttgggcgaaggaaggcctcagctgcccccagggttggggttgtgtcgtggagcagggacggctgcccggagctgttctgagctggggccacagggtagggtgcctgcacccccacatgtgtcagtcattggatgtgggttgccctggggagggggcatgaccttgacgatcttgagcagtcccggggatgggctggtaggggtgtgtgataggaacctggctatggctgtcggtcatgagcaccgggcagcctgaggccccagaggtctggttctgagagaggaagtgtgcatagagcagggcccgtgaggtctgcacatggagtgagcaatgcacaattgtctttaatgggcccatgcacttgaagagtgggcgctgtcaggagatggattgcttgcttttagagtaagaagacagtgccagataatccgaggcaagctctgtggcatttgggatgcatacctgcatttttggaaccatttccaaaaacaacctttgtttgtagctgcctacagttgatctcgttctgtgtgtgtatcacccagtcaagggtcactttatgacattgttttttccatgcaaatgatttttaaggtaatcctaggaagctggaccctttttgcgtgtccttgactagtgactcagagcccagtggaaacctccaaatggaaatggccacccattaacacacactgcaccctgctgggggcagccacatcagctagaagaacttgaattaaattggggtctgataacttatttttatgcaataaattttattaaacataaatggaaatcattagctgaaacacttaattaaaactatggccaaattagatgaatgctaaggaacgttctctgaatttattgcccagtgatctatagacttgctcagtaatagactcccagaaacctccttaatgaagctattaagtgcataaatatcatatgtgccaaatggcaaaatttagcaatgatctaacccaatttacttgctaagtaaataagccctgttgagagaagccactaatttatactgatgacagttgtaggacaaaaaccccttacctgcctgaaaacaggcattttaaataagcaatttattgcatcttgaggctgggcagcgaggagcttttccactcttcttgctccatttcctgaattttccttcttgtgaatgtagaacacacgccatgggccacagagtcactttggctttaatctgctttgtggagtttgaaattccttctcagggtcccctcttctctgcttgcagatttcgatgagttcttggctgacttcaaacctggaactgctgtggttttggagatccgggtgggctgcagctgaggccttggacccagcctccccacccactcctacccttaggatctggctcatttgaatggtcaaagcttcattgctaaaagctgggcttcagactcttcatttaacagctgggctgggtaggttggaaggcaaaggcccagatcgtggccgcaggtgggcgttgcagaaatgggctgtcctttcccttgctgacctgtgttgaccccatctcttgatctcagcctcgctccggcagcatcagcagcagcacagtggcctttccctccacctggagtgcccgtccccaaataaccacacactgctccctccccagctgatgccagagtgcagcctgctcacctcctctcatcatggcgtccagcagggccccctctcctgtcatctcccctccctggctggtgcttgcttcacaactcttgacaccacgtgatgtatttttatgttttttttattaattgtccatctcccctccttgaatgtaatgccagtggagccaggggatggtgtgggtagttgttttgttcatttgaattcctagtgcttcatacagtgcctgtttcctggtagaggctctctaaatattttttgaataaataagtgaatgaacgagtggatgatatgcagcagacacttggagtccccgctgtgcaccaggcactgtgctaggacaagaaccacacttgtccttaaaatggttgccatctattggggctggaaatgaagtcaggggaagttgcacgaagcaggttgattctctggtggggccgtgcgtggtgaggaagcagcacagggaagtgtgcctaaccgggtggcagatggggagggctcctgagagaagtgagtgcaagctgagctcataccctggtagtctgtgcctgtgtgtagcgggtgatagctgtgggggaggctcagtctctctggagcatctgcacagtgaggacagaccgccaaggaactccaggaacaggcatggggcagaggaagagaagccctcagacccagtgcaaggagagagagtgagccaagggcacagtcaactacgtgacctggtgctcagcaggcaagaaggagcaggagaagcatggctactcactggaacaaggaggctgtgctgggggccaggtagcccaggccagaccgcagtgcagagaagaaagtattaaaggcagaagcagacacagtgaaggtgggggctctccagggttggctggcaaatttttcacatggtctaatccccacttgacccagttgagacccagactgctcaactagacacaggtcggcctgacttcgaagtgtgagttatgtcactctgatagtgggtcctaaagtgcagatgtgtttgggtgatgcttttcagtagcctatggacatggcaccaagtgacaatgacttccgtgcctaaggagtgttctgaatgcagaacagggagcacctcctccgggttgggagagatgcctctgcccccacctgcccagtatcggcctctgtgcatagcagtactgggctttcctggaacccatgtttcatgacaaatgaggctggagatgaagtcagcaggaagttgcatgaaaccggttgattctctggtggagctgtgcatggcaaggaagcatcagcacagggaagtgtgcctgaccggatggcagatggggaaggatgctgagagaaattaatgcaagctgagaccatatgtgcactgataggctcctcaccactctactgggtcgaacagtgtcccccctataatccatgtccactcagaacctcagaatgtgaccttatttggaaatagagtctttgcagatataactggttaagatgaggttgtactagattagggtggatcttaattggccaatgtccttataagaagaggaaaatttggatgcagagatggactgagaagaaggccatgtgaagaaggccatgagaagaaggactggagaggaatagctgccagtcattgatataaaaatggagtcgctacatcaaccatagtaaaatggggtgcagcacccccaccacatgcctgacttatcacaagacatccctgcttgtatgcctatgacaggaactatgcaaggaactcctcaaaaacacaggattccaggtaagccacttatggatgcacataacttgtccaacactggctgcttccaccaatgagctaacaccaactcccggaataagcccctgtgatcaatggtcttcatttcaaaacaacttaaggtggacttctcccttttgtctttaaaagcttctcctagtcccaacctctttggatgtgcttatggctcaccagagaatgcatatcctggattgcaatcctctgctattcccgaatcaactctttggaaagtctctctctgtgttgttattttacaaggccaagtaataccagggatttccagcaaccaccagaagctggaagaggcaaggaaggaccctccctagagtctccagacagaagatgcctcatagacacctcgatttcagatttctggccttcggaagtgagagagaataaattccagttgatttaagccacctggtttgtgtgctttgttggcagcccatgaaagtcatatcatgacttttgcaaactgaccaattaataattaagaaaaatggcctgagatggtaaactgatgagcattttgaaattcacaaaaatttgttctcacgtttgttatcctgggtgaatcttctgaagctgtatgttaaacacacaagattcctatgtaaaccatgatgtcttcacaatattgagcatattttatcttttaaaaaagtaaattacccattcttgcacaaaaaagtagatttttgttgatctatatttttatttagaataaatttgatgaaatcaggtggtgggacagctggcccagcttggaataatgatccctctggatatatccttgtcttgttctcatttacaacttttgaggcataaaagcatattttcaaaaaaccaacgcttctatatgaaagcagatttatcattcagatccatcattaatttcccaatgacgttctgcctgcccataaaaaagacttagagctcgttatgaaaattttattccagagaaaatggtcttgggacatggtttgcactgacctcttttaacctcttgttccctgtgttattattattaagtaataatgttgcttcctgccattgcctgccaacataactcttccctctttgtacttcaggaatctggggacggttttggttgcagagggcagatcagcactttgccatcgccctgtgctcctggccagtccccatgccgctgctgggatgacagtcttacatcatcttttatgagtacatcaacttatttgcaattacgtttagattgtctaataaaaccgggtgacattttagcttacagtttatgtcccagtaaaaggctccaaatgttattgccataagaatctatgtggcaacccaacataaaccttttatttctagctggacagctgactctgcgtttagcaacaggaaagcagggaattggaggagcgggtttcggggggcggtcgtgacagcagccacctcctgcgggttttgttttctctgtcaggttccccttctagcactcaaaagcatccagcactttctgaaaaggaggcctgggaaatggttggacatgtctctgttgtgggctctgggtgtgagccacagaagtgagagctgaagaaacctcagagaccatcaggcttcctcgtgggatagttttgggtccttaggaaattaggccttggcactcagcttagatgacttccattacagtcctataggtgtgaaataaacatctggctcagaggttctccactgagggccaccatgggtcagtgtctggagacatttttggttgtcacacctgggggcagtgctgagactactgtgtgcgcattcatctagcgggtgcaggtgggatgctgctgacacgtaacatgcacagggcagctccgccacagagaaagatccaaccccgaatctcggcatgacggaggctgagaaatcctgatctaagtgatagcttactaagcaaggccttggcgttcagaagcggttgcctgatttccttctttcctttttgagtcatggttttgttgagttcttgaaagtgatagacctgctgtaaataaaatcactggataaagttggcgaggggtggcctgccagcctccaacccctgcctgatgtggggtgcgtggccggccagcctccaacccctgcctgatgtggggtgcgtggccagccagcctccaacccctgcctgatgtggggggcgtggccgggcagtctccaacccctgactaatggggggggcgtggccggccagcctccaacccctgcctgacgggggtaaaatagtgaaaagcaaaagcacctggtgtttttaggagacaggagacacaacaactgaatatgtgggcagatttgggggaagaaagaaatgagccccaatgacctgcttcagttttctattgaaagaaatgcaacttggaagcttcattttttttttttaagcacatcctttaaaaacattgcccagtgcgtttggaagtagccttccagaaacccttgggatttatgaccccaaagtatgctcacaggtgctcccaatgaacctttaggtgtaacgtggatgaagtgtggaatgtgccgtgactcctgcctcttaaaagcttacagattccagaaatgaaaccagttcatgcataaaatatcttctctcagagcacggtcattttcatgcttccccttgtgtgatgatcagggttataaagtattgtggttataccagaagatcctcaactgtgtggaaagaggctcttctatttatagctctccccatcgtgacttacagcatatgtgttaatctccctgtgaattctgagctcccaaatgctgaaggagatatgctaaaccctttccccgtggcgttcttccagacagaatttaagagacaccagaggatggcacatttatactgagcttgcagtttcctaaacatgaagaagatgaacggctctcagttaagcagcacgggtcagataggagcttgaaattgaatatttgagctgacacgggagagacatactgtgagtggccccacgaagttagctggatctctaagcttcctaagacaccatgattagaaatagattgaggtcagggtatgcggtcctatttgaattaatgaaaagccaaattgctcctcagagtgctggtttttgtgctgcaggtcagaccactgggttttgtggaccctttgcagaggtcgggggagcagctgggctctgtccttttctcacctttcgtcttctatctcttatagtttgagattccaaatacgatttctgtggagaaaacaaaaaaggactctgtttttaattcaaaaggtgaggcatggttaattaaaacattgatgtgaactgttttaaaagaaaaaaataattggtttacttttgagtgctgaagagtcttggcagagtggaaagtaaatgggctttgctattgatcagactttggtcaaaatctatgtgccacttactagtcctctgacctcaatcctgctgattcttagtttccttgtctttaacatggggatagtaattcatactttcaatgggcactgggaggtcatagagaatgacacccacagctccctttgatggcagctgtggcagagggtccagacaacaggtctgcttaaacaaagaggtgggtaatgatggcagttggtgaatggaggtcttggttcccctaccgcaggtccctactgacctttctaagcccggaatcatttagagttctttggtagcaagcaatagaaatgagctctgtctattttaagcaaaaatgaatttgcctaaagtctgctgggtggctggaatggacaggaatgctgtaggatcaggctctcgagccagagagaaaccagggcagcccccttcaaagaacagaacagatgggcgagtttgttgggcatttccaatggaaataagctgatgccctttagtttttctttcttccctgatctgactccttctaactttgtttgggtcacaagcctggttcttaagggaggacagagcacttagactaaaatgcatgaaacctctgcacagtggggcagaggtgagctctccaagtacacccagatattgttaggatgtgggaagggatgctgggaaccaaaatgctaacagtgcactgcaggcttcatctgtcccgagcttcagaacaccttgcctacccaaagccatcctcctctcttaagtttgcttacttcagccaccctcggctgccaactggataaaaagtatggtcagtcccaagtcatctgcccctgcttgtttatctgaagtcaggattttacggaagcatcggctgccatggcaaatattcttgtcatcaccaggcagataagtgacatatgctaccatctcagggagttagagagtctttctaatgatgcactccaaaaacttgatctgagatctcacaagtttccaagttaattaataaccagggtccccagaaacatgaacaaacattcattcccaacatccttcctaagtaggtcctcaatatgtggatttgggatgaaacctgaataaatgattggcatgcatgctctgatgcaaatgcccagctcccctatgtgttccctgtgcaaagacagctttagtattctgttgggaaatgcctcagatttgttttaatggtatcttattctataagacagtatgaagcgatctaggaaaaaatgaacaatacaggcatataggctaattaaaaaaagcttgcaaaactaagagaaacaaacagcctctgagtttcatgcttatgaaatatttattcagtgccaaagaagacactgaagtcagaaatgaactttgcaaagtaattacttttgatcccagcaaaatccattcaaaggccttcaggtaaacatcatctttgatgggcggaaggtgggttgtaaagcaacataatatttttaaaggaaacaaggaatgtgtccaagtaagccacttgtccagggcactctggaaagtgttcctgggtggaacttcctagatgtcctccttgctagccgtgcagagatataaataggaggaagatgagatatgatcagatggcaaataagaaagccacaggcagcacgaccatgagaggggtcttccttaaaagactctaaatgaggcacacgtattttaaaagagagtacgtgccactaattttgatatagatctttaaaatgacattaaaatggaaatacactcaaactaggcatctcctgggaaaatgtcagtagttatgttacacttgttttccgtttcgttccagtgctcctgtgaaaatagctttatcttcaatactcccagtgtggaagaatacagttgtagggagaggggagtatttgtttttttcagttttaaatgaattctccagggagggtttgctctgtgtgagacatgcaagccttttcaagaactgagctcacctggatattgattccagtggcatgtgtttgcctgtattcttttatctttagattttaggccctcttagaggaggccagggtccattcccaagcttaagaagtaacatcatttaccaaagagccctgtaacaaaacaacccagggttctaagttcacatgtggctcataccccgtaagacctaatttcccggctctgaaccagagtccagctggagatgacctgatggcttcaggggatgtcccagggctattcatttctctttaaaaattttaaatctatttatttgttttcgagttgacaaaaaacgtatatatttgccatgtacaacatggtgtcttgaaacatgtatatgtgccgggcgcgggggctcacttctgtaatcccagcactttggtaggccgaggtggacagagcatgaggtcaggagatcgagaccatcttggctaacatggtgaaaccctgtctctactaaaaatacaaaaaattagccgggcgtggtggcagtcgcctgtagtcccagctacttgggaggctgaggcaggagaatggcatgaacccgggaggcggagcttgcagtgagccgcacgccaccgcactccagccttggtgacagagtaagactccatctcaaaaaaaaaaaaatatgtatatgttggggaatggctaaattaagccaattaacatacacattacctcacacccttatcatgtttgtggtgagaacacttcagatctactctctgagcaagttttcaaagtccaatacgttggtataaccatagttgccgtgttgtacacagggatgcttcttatctaggttcacgtacccaccacttcaccatctcattccagggccatgtcagtgtcaagtctaatggaagtaggttcccatctataaattccccatatggaaaaaaaaagagtaaaacattcgagcccacctctttgcttccataaaacccctaagacattttcttataactcaaaagtcatttctagaatactgctcttgaaaccctcctgctgaaatcttggggcagcacttaaagaaagaaagaaaaagaaaaagaaagaaaaccaaaactctcttttcctcctcaattcatagggagaagtgaaattctacctcacttttttaaaagaagagcctggaattggcctatccgtctttttccccgttggatcacagagcagaaaggaaggtgagcagagattcagaacagtaataaaggtcaaatcatcctccaaagagggctcgagactaatctcagcctttgtaattggagcagttttagattttgagggtgtgctttggaaggtctggagacaaagctggaggtgttttctttggggttatcccatagagctgatcctcactaccccttcaaagtggaggagtggtgagggctgcttccatctgtgatgaatgctacccaatgcctaatgcaaaccagccctgagcaccagctctgtgcacagaggagacattaggaagctcccaggggctactggtgggggaccgggacggtgggacagaggaggccaagaggccagccagggtgggatttgcagttagaagcaaaaacacgaagaaacctgggagtgcagggccacaagcagaaacagtcaaagaccagaggagatctggatacatctcctataccaaacatcacatcgtaaaaagacaacaaagtgtaagaggctgggcagcctcgtaagagcttatgttgtcccagaacctcctctgtggagcttctgtggtgtgcaggtcacttgctgttcttgatactttgccactcgcccccgtcctgatactgtgaggtaggtcttgctctcacctctcacagatgaactaactgaagctagaaggctgaaatcacatgccaaaggtgttaaagtcccgttggtcttattggaagggccccagtctctgtgtcccaccaccctgcctttcaacttcagccaaatgtccttataggcgtttcgttataagacacttggcaaaacccattttctccctgagattaaatagattcactggctcaccttgctactttgtatgctttgcggaatcctggattgtttgtttgactacatccttctcttccacgaggaagacgagaaagggccccgttctcccccagcagatgtgacagtcttgctaagtgacagtgagaagtaattagcaccctgagtcccactgcctgcaacctgtctgcagcggttcccacgttccctgtcaaacggggcttctgagcgcatggataattcatggttactttctgcatgcaggtagagattctgctttggttgttattggaaaaagcccagcttagtgggtgaggcaggtttccttctgaaagggggttttgcacatagagctaataggctgatgaccagctcggatgggctctttgggacacacagagacaccccagcaaccagttcaaagcagagccccaagaagggctaaattggtttgggggttcccccgttcgtccttagatgtgctgcggtaggtagcttttcaggtttattcattcacctaacatggttttaaggagcatcactgaatgaatgatcaacccgggactccgttccacagtcatcaatacagacagacagacatcatctcttcttcactgggacattctatatttcactttacttctcttgggccccttgctattccctccctcatgattcagttggttgagtacctgtctgtttccctgtggctgtctatatattccatcatcattctcctgtcactactgctccagcctctgctcctccaggtcctcccaagccactttgtagacatgatctcattcaccacagctctccctctgaaggagacctatcaccatcttcagtagcctaggagactgaggccacagtgcggatgtaactcgcttgaagtaacgtggtagctctgagatgcagtgagcccttgaacccaggaagtcagctccgcagcccatgccatttctaccttctgcactgtctttctgtgcccagcatcctgccaggtgtgtaggacacattcaaatatctattgagtataaacaagtctattgagtataaataagtctgagttactgggtctctaaaggctaacatgttactctttctagggatcttttgtaggaagtgatttgtttttcaacaaaaaagcaagggaaggaaatgaagagctttcccagtaaaaaaattacatgggatcaaacacatcctacattgtttttgtttttggttatgtcaagaggctccaaccacttgcctatcatcgagcactgagtctgggccacgcactggtgagctgttcacattcctcagctcagctaacccatgaggtcgtgctgctaccatcattggacacatgaggaggccgggctcagagtggtcaagctggcccagctcccacgattagtagcggcggaactcagagtcgctggagctctccccttggcatgttcatttattgaccaaatattgattgagctgatactgtgtgataagttcagggactataggatcaactgagtatgaacaccttcaccctcttccaggtgggcgtttgtgttctgggtgttgtccacgctggacgtgccagcatctcccactgagccagatgttccagggctaaggccagtttcatttgaaggcacagccttactatatcatgtgagtagcaggtggttggctgcaggtcagggggcttattttctagactcctaacctgtgagtgggttggtagaacatctgcctgcaaatgtattgaaaagctttacctagataaaaatggagttgttgtaacatgtacccaatacctttcttctctgtctcactacctctagattaatctgatgccaagtttttggatgttatgagcaaccacctcatttattttttgtggttgtttaaccacaatgagtaaggtaaatttcgttgaaggaataattcatagtatggctgttttcccactggaggggttttaccttcgtattctttcttacgtaagcatcaataaggaagaatgggcaatagaacactcctccttaagattccgcatggttcatactatgggtcacattctcaatgagcctaagtaaaatttcctccacttaatgttcttgctcattggttgttatttggaagaataatgatgagaatttgagaagtctttcagatggaacttaaaaattcacatttaatatttatagtgtagaaaggcctaaattggaatttccaaagtcggggtatataggaatgtagaaactgattctgggcattgttcaacctgatataaatcaaagtggatgcttttttatttttttaattgtgcatttcatcaggatgcaggttgaacccagaataataatgtgaatgctttacactagttgctgacttgaacaatgcatttcatttactttaaatattctagaattcagaacacagacttgatacttatttatgttgtacattttatcatttagctgctttttctagctcactgaaaaaagtctgagctctgaagccatgggctcaaatcctgggtcagttccttaaaaatcctctgatcttggactgcctcattatctgtgcctcagtttctccatctgtcaaatggagatcataaccatatcccattcacaggattatgaggattgaaggagataatttacgggatgtatccgcattgtgccagccccaagcaggccctgaatcaaactgcttgttttgattattagctggagagactagactttcgtatagcaaagaaaaggtggttgcaaaatgctgtgtgtgagatggaccagtcagtatgaacaggaaagtctgggaaattacttcttagagaagtttaggtttgtggaagaactggaggcataggtgggattcagacaagcaggggagtgggggctaaactgagctcagttccaagccagtgtgggtggtgggcagagcacaggccatgtcagtagatttgtgtattcccgtctgcatttctattgtgcaggttggctgatgtgtctcaatgtatgtttatcttgttccttgagtcacatggcccccactctgtctgcattttgaacatgtctttctgttcatttgtgttctgcatacagagctggctccagaaaaaaattctgtatattggttgcctgccacatgctgatgaatgggtcaatcagaggtgcaggggtcgaccttccaagaatggagaaagagaattcaggccatggttgcagatgcagttagggtcttgtagagcagaggcagggctctgtgctgggggcgggggaagcagtgctgtctttaaagcctgtttgttattcatagaggaaagcaaaattttgcagaaataagataaatgttccatgcaattgcacaagttttcttgtcaaattaaaaacacaaatggtgtagcagcagcctaaatattttctgcttgttgtgccacctccagcaaaaaataaaataaaataaaataaaataaaataaaataaagtgagaatgggatgcaaaggggaaaaaaataagaaaaaagaagtctcaacacaggtgaagctaagcttgttggcttcccatatctacagattctgttcctgtgcagcgtggaaggctgccaggaaaggtgtgagagggtgagattgtttttgaaaatcatctgtcgcagcttctaagagcattttggtgctgtttgttttcattatgctgttggaggtgagaaaactgtgatgcggtcgactggcacctagcattgcccccatctggaacatctgcagcctagatctgttctgatgaagtagaagccgcagatcttatcctgaaacaggccaggtgcaagtgtcctcttagaagggatcaaccatgggatgcggcattaagagaagagagaaggacatccttacaactgtgcctttctttcaactcagtcgtgcgcattaggcttgtatcagttaaagtgcaggcaagaaatttcaagcagaaagggagtcaggtgctcatagcattgctggcagaattgagagcagcgggagccatgggatgggggtgctgcctggaaatcaggaaactggagaagcctgctggaacctgctgaggaacccatcactgcagcaagagactgatggtggactgcaggggccaggaaggtgcaggaagcccctgctgctgcaggagaaaggatgaaggatggttatcttccaccttccaaatctcacaggaacacctcttctaggtggaatccaaaccagattccttctggaaagggattctggaaagtgtagttcttatgcttccagcctctgagataagcaaggacaattgctggaggcgagggtgtcgctgaataccaaggaaggatagcaggtgtagttgcccacatggccactcagcatccacatggacatcccacccatgttaatttccaaagagccatcacagaaacatcatcatgcttcctcacaaagaagaaatgctcacctccaccccaatagaaagggtccaggtatccatctctgagtgatggtcaccctccatattcagtaaaaaacaccctcggatagactgtggttgaaagactaaacctttaggttagccacagtcaatatatcttatataaaataagagaggcggggagagcaggggaaagagatactgggttatgtgtgtaaaaacatacacaataaagcaaacaagaaacgctgtgtagttcctagagtcctcatctctaccagtggtcacaaggcttttgtgatgggtaattttaggtgtcagcttgactggactgaggaatgcctagatggctgctgaagcattgcttctaggtgtctgtgaggatgtttccaggggagaagggcatgtgagtagactgagaaagacccccctcagtgtggatggccaccgtcaaattgactgggggcccagttgggacaaaagggtggaaggagggattctcactttctctttttctctctctctcggtctcagtctctgttccccacttcctgagtgggacgctcagcgaggatacagttagctggtgaggatacagagaaactggatcactcctaccttgcccgtgggaatataaaatggcacagccactctgaaaagcagtttggcagcttgtcacaaaactaaatatgcaattctccttctacctttgaacatcagattctaggttctctggcttttggactctgggacttgcaacagtggcctgggaactacagggcctttgacctcagactgggggccacatggtctgctttcctggttctgaggcctctggactttgactgagctacactgctagcttctccagttctccagcttgcagacagcctgttgtgggacctctctgcccctgtgatcatgtgaggcaattctgctaataaacccctctcaaatatcctatgggtcctgtctctctggagaacttaacacagccctatctggtatttataaattcctggcaaggcacagtggctcacaccagtaatcccagcactttgggaggccaaggcaggtggatcaccagaggctgggagttcaagaccagcctggccaacatgctgaaaccctgtctctactaaaaatacacaaattagctgggcgtggtggcatgcgcctgtagtcccagctactttggaggctgaggcaggagaattgcttgaacctgggaggcagaggctgcagtgagctgagattgtgtcactgcactccaacctgggcgacagggtgagactctgtctcaaaaaaaaaaaaagaaagaaagaaagaaaaaaatcctcttcccatgctcttgcttctcttagccattgcagttccacccaacatctcattcctgaggagactgtgctctcagtggtctttcctgttttgagattgctatggttttccatgtgcaagtcctaagaagaaccccagagagtccctgggcttccacttttctctttccttcccctagggcagcagccacgtttctcttttagaactaccctcagtgggctcagccaacatggggcggcttcctttgcctttggaggcacaaggagtctcagattcttgcaccacagtattaactcccaacattgtttctttggaaaccaagaccactaatctacagggttgagagtttctgagacgagaggtaaaaatctgttgagtggagggttcagtgttatagggacaggggccacttgcattttcaccccttagttcccagatccacttattctggtgaggggaaaaacactactacatattgatcactggtccagagttcacactgcatcttacagatacagacttcaacttagcaaggtgctgcctcccattggtctcatcactgagtcttcagaaggccattgctcactctaactgataataataagacttacagtgtagctgccataatcaagtcagtgtgacactggcagagagatagacacgtggatcaatggaaaataacagagaactcagtggttaggtccacataaatacgcccaactgatttttggcgaagatgcaaaagcagctcatagtaggaagaagagactttcaagaaaaggtgtgagagccattggacatccataggcaagaagaaaacaaagaaaaagataaaaagagaacctctacctaaacctcatcaccttatgcaaaaattaactcaaaatggatcatggactaatgtaaaactaaagccataaaacttctaaaaaaaacataaaataaaatctttggagttgagggctaggtgaacattcttagacatgacacacaaagcacaacccataaaagaaagaatggatacattgaagcccatcaaaatacaaaacttttgttctgtgaaaacccatatgaagaggatgaaaagagaagctacaggctaagaaaatactcaataactatatatccaataaaagatttatactaagaatatttaaggacttctcaaaactcaaatgtaaaaaaataaaagaatccaattagaaaataggcaaaatacatgaagacacattttactgaagagaatatacagatggcaaataagtatatgagaagatatttaacatcattaaccataaggaaaatgtagatgaaaaccgcagtgagaaatcactacatacctgtcagaatggctgaagtaaagaaatagtgaccacaccaaatgctgatgaggatgcagagaaactggatcactcacactttgcccgcaggaatatgaaatggtacagctactctggaaagcagctcagcagtttcctcataaaactaaatatgcaattactataccagacatccaacagttgtactcttaggaatttatcctagagaaatgcaaacttaaatttgcaccaaagcctgtccgtgaatctttacagcaggtttgtctataataaccccaaactgggaaaaatccatctgtcttttagtgggtgaatggttaagcaagtggtgatatatcatatcatggaatacgactagacgatcgaaaggaattaattgcggatagtcataaacgtgaatgaatttccagggaattatgggtggaagaaaagccaataccaaaaagttatatatttttgtatgctcgagtctgtttatataacattgttgaaatgacaaatttatagaaatgaagaacagattgccggttgccagatgttaaggagcggggtgagggtgagaggtgggtgtggttataaaggaatggccccagggatgctctgttctctttaatgattttgacggtggagatgtaaacttgcacacgtgatgcgattgcatagaactaaacacacgcgtgcacacacacacataccacccacacaggagcacaaggaaactcatgaaacctcagtaaaatggatgggttatatcaatgtcactttcctggttgtgatatttcctttaattttgcaagattttactaccagaggaaatggataaagtgtacgcaggatctttgcattatttcttacagctgcatgtgaatttacagttatctcaaaataatttaatttaagaaaaaggatggtgagataggtggtaagaacagtcaatctctaaagtggcccgaatgactcacttctgctataaaaaaaaatcagtgtttcagtagctatttgttggatggatggatgatcatggtaggctcacacccttctctcccattgtctgccagaaccgtgcttttgatcttgctggcagacaaatcctggtgggtctgccttgagttttaaatctgatgttaagtttaaatcatttggacaaaataagtgaaatattttttaagaataaaaagtaaataattaaattgcatataagaaggccattgattgttgtgtgatatatctcctgccgccttaatgcattatcttatcatttgcatttcttccttggatattcctttaaaaggagatttgtatgaaaataacagcgtggctagtggaaatataaatttatatccttttcttgagaggtaacatgacaacatgaataatttaaaacaccctgaaaataacaataacgaaaaactgcttagtctagcaattcaacatctatgaatttatcctaagaaaataactggacaagtgtgcaaagatgtatgtgcaaggatattgactggtattgtttataatggtgaagaaaatggtaataagcaaaatgtccaaaataaacaaacaaacaaaaacaacttgaattgtggtacagtaaaacaattgagaaggaaatagccattaaaaacttaaagtataataaaaaaagaaaaaaaagaaacaagcaggaatacatgttcctaaaattctcaaaaaaaaaaaaaaaaatggtactgtggttctgtatttgctaaagtgagaggttgtttcagaatagtgatctgaaagaatccatagttatttgcaaaatactgaggttgtgtgtggggggatacataagcatgaaaataggacatcatatgaaagggtaaagaccccactgcaattgtggaggggggagagttcagctaattacatagttggaaaatgtatccctttgagtatgtatacttattttctgtaataattgcttgcatacataaaaatattcatgtctcctgagttattgtgtatgaggaatttttgttttgttatcgtctatattttctaatttgtaataaatttaccacaaggaaaaactgaataaaaacagcaacatttattaaatacgatgaagaaagacaacctaattctgacttcagaatgagccatgctgccaacatctggctgagtcggtcccagcttcaggcaagtgtattcagggggcacagatgaagaggtagggttgatgtccattcctaggagctggacatttagttaggccaagaaaaaaggatgggtccagagctctttgagggcaaagaacatgcctgcctcattcactagtgggtccttgtatggggctcaataccaggcttacaaaacatttgttgagtgaagaaaagaaagggatgtcacttgctcaggaaggacgtcggagtgcctgctctgtgccaggcatgtttctttgtgcttaggaagacgctgtgaatagggaagccacggtcttggcatccagtgggggaataaaggggccaaccacagagagaggcatgggaagaaactacttgcagcatgagacagatggcagtcctgtggggccacagcaggaaaggactttccggagaggaaatgttcaaaccaagctggcctgttgagtcaccaccagagatgggatgactttggaggggcacattctagggaaagcaaagagaaaatgcaagagctgcaaggaagaaacgacttcagggcctggaaacagagagagaggacgggtgtggccaaggtgctgggtgagggatgcaggctgcacttggccttgtggagtctgggcaagtccagcaaggagttggactttattctgggtgatacaggaaactgttggagagctttaaaaatcttttaattttagaatggttttggattgatagaaaaattgcgaaggtagcacagacttcctacatatcccttaccctgtttcccccattatcaacttcttgcatttatatggtgcgtttgtcacggttaagaaactaacataggtgtataactactaatgaacccgtaagccttattctgcttttactcattttcattaatgtcttttttttctgtttcaagaccccgtccagggcaccgcctcgcacttagtcatcatgtctctagacgcctctgggctgtgatggtgtctcagacttttctcatttttgatgaccttgatggtttctaggcatcctggccaggtgtccttcagtttgagtttgactgatgtctttctcagggttggactggggtgatgagtgttcagggagaggcccacagaggtggcaggcccgtgatcatatctgggctcctgctgtcaacacgctgttactggtgatgggaacgttggccacgttgtgggtgagggcagacactggagagatttaacaggagaggtgacctggtttgctacattttttaaaagggtcagttgggctgagggaattaggtaatgtgagtgaagcatagtaggatgaaaccaaagctgtgttggtgacagtgggtgaccaggtggacctgagatgcagattcgtgcagaggtgtgtgcaggggtgagtcatcgagaggctctgaatgccaggctagggagttggcattttatcttagtagatttcaagcactggcctcagagttctctcttcaaatagaactttacaaaaaaatagccaaaggcaatacaaaacctaaagatgaacttcctgtgatggaaagtgagaccctgagtgcagcgtcactggaggctctaagattcctaaatggaacctcctgggtggctgagggcaaaccgtcagcaaggcatgtgacaagcacagcgagccagtgaggttcctcccctcctccaggtaggaagcacctgtacctggatcaggtgggcagaatggaaagtgtgaggaaggcaggaagagccgaagtcagtgtgcctgttggcagaggtaggggccaggacaatgccgatattgacagcagtgagaagccagcacccccacatggggaggtaggcatgggcagcaaggtccctttagaggtaaaggtggaacacctctgttgctgggctccccaggctttgggtgtcctctgggcctggtctcatggagtagttcaggctggagactcaagactgcagaagacgctatggcgaggggagatccacctttgtgtggagtttggctaccagtgatctgtgcattgaactgagaaaccacctcctggacccacgtttcttttcacgtgagcatttttgtgatgtggtggtagactgagccagattatgaccacaaatgattgctcaagaggcgatctgttaaatatttaatgtgcaatcacagttgcttgctgtggagctccttctccgtctgagatgagtagggtctattggcgggcaagttccaatttagtaatgagatcattataatcctgacctcctcggaaggatccttcacaccagagcaagccacttctctgaattctctccacctcttcccagcatgaatttagttctcacaactctcaaaggaactcccatttcctgtttctcccctactcctgacctcactctcactccccttagcaaagttgttctgtccttccagactccttcacgatggcttcgcttcatctcacaaatgagacgctgaacactgctacttccacacactgtgctttgtcccttcagggacagagctggggcctggtttcagctcataaagagctcacagtcttgtgctgtttcttggaccaacagagtcagaaatagcagaggttcttgtgagcacatagaatgttctggagcccatctcagatctttaaatgagacactttggggtcagagtctggcctcctccttttactacacaagacccctggcttggttaggggttcacccttacaccaaactcctagagtggttgatggtttcaccctctgtggtggttgatcttaggtgtcaccttgactgcgcctctgggtgcccaggttaaacattgcttctgggtgggtctgtgagaagccttcccaaagagattagcatttgagttgctggactcagcacagtagattgacctgccccacagggatgggcattacccaatttgttgagggcctgaatagaacaaaagatagagaaagaaggaattcgccttttttcttgactccctgcttgaggtgggacatctcatctcatcttctcctgctatcacaataggatttacacctcagctcccctgtgtctcagagctttgaactccaattataccatgggctttcctgggtctccagcttgctaatggcagactgtgggacttctcaacctccatcaccacctgagtcaatttcttttttcttttttctttttgtttttttttttggagacagagtcttgctctgtcacccagagtggagtgcagtggtgtgatctctgctcactgcaacctccgcttcctgggttcaagtgattctgctgcctcagcctcccgaatagctgggcctacaggcatatgccaccatgcctgactaatttttcgtattttagtagagatggggtttcaccgtgttgctcaagctggtctcaaactcctgagctcaggcaatctgcccactttggcctcccaaagtgctaggattacaggcatgagccaccgtgcccggccacaagtcagtttcttatagtaaatctccccacacccatatgtgtgtgtgtgtgtgtgtgtgtgtgtgtgtgtatatatatatatatacacacacacacatatatgatatatatatacacacatatataatatatatacatatataatatatatatacacatataatatacacatatataatatatatacacatatataatatatatatacacacacatatatataagatatatataatatctcctattggttccgtttccctggagaaccctgactaaaccaccttcctagagaatctagaaagtagactttgcaggaacattttctcccttttgctagttgttttgtcttgtgtgaacctgaaagagcccattctccgaaacagctcttaagcatctaactgggcctagtttccaaatagagccaagcagccatttgctgactagaggtcacacacatactctgtgttccaggaaagcacacacccttgccatgtaacttagggacattcaaggctgttttttcctgttcatgccacctgaatcagtagctgtgggaaaaccttattttcctcctggacctgagcaatagactgtgacagcatcggccaatcagaactgagcagtttacatcccacaattgcataagtggcccagagtgggaggctgggtaagagctttctctatcaaagacaaccactctcttggttctctccgggcccacctttgttttgtactgaaggctgcatctccccagtttgcaaactgcttgtgcaaatagagtctctgttaacctaatgcttctttctcaggtgtttggttaacacttgtacatggtaggcattctgtctatatttgttgggcagatgtgtgcgtcgaagtggttaaactttcccagccagagtgggcatctcctctggggtaaggagttggtgacatgcaggtacctgaggccctgccatgggtgcatgggctgtgattgtccatagaccacgttaacttaaacttctggtctaacacatagagtgggcatcttcctaggaaaccctggaaaagcagcagataggactggctctcagcagtgacgaaaagcaataagaggacaaaatgtggtactttacacaatggagtactattcagccataaaaaagaataagaacctgtcatttgcaacaacagggatggaattggaggtcatcatcttaagtgaaataaaccaggcacagaaagacaaacatcacatgttctcacttatttgtgggatccaaaaatccaaacaattgaactcatggagatagagggtagaaggatggatactagaggctgggaagtgttgcgggggtgaggaggacggacatggggatgaataagacctagtgtttgatagtacaatagggtgagtagagtcaacgataatttaattgtacatttaaaaatagctaagaatataattggattgtttgtaacacaaaggacaaatgcttgaggagatggatactccattttccatagtgtgattatggtgcattgcatgcctgtatcaaaacatctcatgttccccataaatatatacacctactgtgtacccataaaaatgtaaaaaaatgattaaaagtctagatataatttaaaagaggaaactgtctttgtgtggaggccagctgaagacagatactgcatcaggcacttggcagcctggtttccagtagcttctcaacccagtggagtagactctatggccccattttgcagatgaagaatggaggtgcagagaaatcacagctctagctttgtcaggaggaccatagaggtccaggggctggaggtctgaatatttaatagagggatttgaataaccatggaagttagcctggagagagatttaggaggcagataagcctagtgttcactgtgggggcagatgccttccccatctgtgcagacgattggcccaagtggccatgatgacatggctcctacctacttcctaatggacctcagagaattaaacagcgaggacaacagcgagtgttgtctctcagacccttggctttttcaggactgcctgacctttctttgtccttatttggcttcaagtcaagtcagctcaaccctgattgagcaccggcaatgagtcatgtctgtgaaggcgacacagcccctgtccttgaggagcttcgagtccagtgactgtcacttcagtggaagttgggctggacacagtcacatgtgtatgccagacatgaggctttgttctcattacaataattgccctgcattattctagcaattaagcttctccacgtgtgtggatgcatgttcccaattttttctggcctctaccgaacacaatgttaatatttgagagcagtcctaaaaaattaaataattatacaaactgaattaggatagcataatattaccaatcagagtaatgtggctttgtaatccagtgtgatgtcatatgaatctacaaattaggaagcatgtcagaggaggaaaccacatcctttattgctttgccttaaatagcttaaaactaatcttttccatgagccaacagctatctctcatgtttaataatgctcctccctgcccagatgaagctaactaaatgatgttgccccctgcacctgcaaatgcctggtgccagggcagggacacagggaatggcagaaggggagaccagatgttggctgaggcattgatttatgggcatgaccttccatgtgccccgaggatggctgagaccagggtttgatgaatgcagtgctctgtgtgagaagttctaaggtgacaagcaaagattctatcctctggaggggcaagccctattattaggttggtgcaaaagtaatcgcagtttatgcagttgtaatggcaaaaacagaaattacttttgcaccaacctaataccagacagaggaggtgcaagtgcatgccaccagggcaggtgcaggtgatgggggcagagaaaactcagatgtctccaatctgtgcagagtagggaaacagaaaaagctaagtgaggaaagtgagattgctatcacacagatgcatgtcttaggttttctgattccattcctcatgaatttcattaagtaatcaaagtgctaagcatgaaatgtgggtatgctgtcaccaggtggcagcagcatccactctccaaaatgcattttgttcaaacctagtatgtgctgggtattctgagcacatagcagagactaaggcaaagagtccctggcactgtggagcttagaggctaatgaggtggcaggtgcttacactttagaaaccgttgtgaggaatagctagtggtagttaaatgatacagtgatagttaacagagaggaaagcttttctctcactccaagctatatttttattatcactattaatataaatagaaaataaatattaaaatagttattaaataagcaaaagataatgttgcatttagttatacgattaagtagaggttttcaaatattttttagctttgtgcaaccgaaattatatgaggaagcaaaaaccacaaatacagaaaataagaacttttctgtttgaacagaaacgaggacactggggaggcccttccaatgcaggccagacttttaggggctcgacagaacacagctggagaaacatccacaccacacgcggtttcacctgccacacggcagcccgggtgcccggatcactgtgtgtggagactcaggctcaccggcaaacctcttccggttccggtcagggtgctgcctccctatccactgggagtccttttgcgtttcagatgctcccaggctctcccgcagtttaaagacttaactcagcggctttcagggcctgtggttgagggactccgaaagaactgttgctggtggaccggttcagggtcttgacttcgccacacaaaagaacttgagagcacgtccaaagtaaaggtaagcaagggagttgatcgcacagcgaaagcgcactctgccagcggatcggagcggccgctcaaaggcgaggcagtgctggccgacactggggaaaccccctttatgggggtcttacatgattattcatgaagggctgggaaggggtgttgccgtgaagcatgttctgggctgtctcctggtggcacatgtgctgtggttgtgcatgctagtacacacatcgcatgtctcgttagcatcgtaaatctccacccagttctttagtattctaatgagcgcaggtcagcccaaggacactcatcttgggtttctgcacttggatgaattcgcggatttttccttcgctctttgacctcctcgctaaaggatggtctaaccacgagcctgggatgcggcttgtgcaccgcaggtggcttgttctcgccatctatttagcaagtttgctctcctttaagtgaggctgtgaccaccctctctgacctacctcagaacctgttgcttagcttcagaaatccagcctggtgctgggctgaggtcagcctgaggtcaagccatgcccctgagacttaactgcccttggataccaattttcagcaacagaaaagaatgaaaataaagttcacatgagggctagtgctgctggcaatgagaaggtcctgtgactacttttattaccacttcaacgataaggaggtgacctttcattctcatttctctctctctaatattttgcattctccaactgttatctgtaagaacatcttagcgcatttgaaaagcagggaaaatatgtaataaaaaccacaaccaaccacaccatcttaatgatagcactattattttgtaattccttccagtatctttgcccaaggtttattacttgttgagtatttgcaattgtcctcagtaaaattctgagacatgatttttaatttaacataccttaagatttttgtttgcaggtggctgaatttcttcagaaaaattattttaagggctactcaacactgagcagttagtattcattcaggtggccattctctgatgcctgtattgcttccagctgttgggaaatgaacccagtggagaatattgtttttcttttgctaacaacaacatccgttaggacagatttccacatgtctgattgctgggccgatgacacaaacatcgacaatagcgcttcacgcgtgttgactgatgatttccaaaagcttatcttcccagtaggcagtttgccagatgcttccagaaatagatgagaatgccaatttcatcacactgttgccagcactaggtatgtccactacattttaatgctagtgtaataggcaaaggggacctgctgtctgtttcaccattcatttctttgcatggttgtcaggtgggacattgcattctcctggagaggccagatcactatgtctcccaggaggccctagcagaagctgctctggtgtccagctcctgtgtgaagcctccctggtccctgactcttggaacagacttcttttctgccctttaaacacccctaacatcatgcgtggtcctttgctatgacacagttgttccccattctgcatcgtcatgaggctgtctacaccctctctctctcctgggcagggctccggctctgcaggggatggggacgtgtgttactctgttagtcccctgccttgtccagcacagcactgtacatgccacagaggccccacagagcttgatcaaaaactaacaatgattaaaccaaaattacgaatggacaaaaaatttccatcaagaaacctcaacattttaatgttcatgaggggggaatgtagggtaaatgcacctgatagtaataagcatacccttagaatgaccctgtatggcagatgcgcctaaatgtgtgttctgtgctagggaatccaggagtggccaacccggagattgattctgtgtctatgataaacatctgagcccctggcctgttctgtggaacgtgggccgttcacgggattgaggccctgagtttgggattggatgaaggttgccagggcgaggttaccaggagggtgttaagtgaaaatggtatgtacatgacatgctgttcagaagaggttacagttttcctgcccggcccgccaccactggagcatttctgtacataaggtgatttccctgttcagcccaccatcattgaacactctccctgcacgtaagcccctaataaaaccccatggcttggttgctagctctgggtctcttcggccttcctattgagcttaataggggttcagcacaaccatggaacaaagaacaacaaaaaaattggtgatcttagctctagttttctttcctccctgaatcacttatgaagggagtcatgtggcctttcagccttatctcatttgaaaacagaggctgtaggatcaaatctcagtccccttagtcctatatttaggagtcaaactctgacttcttcatggggctgtcatcagatggcaaagcacacagggcaaggtggagcaggaagctgctggacgctctgccttccttatcgaaatagtgaggttacatggggagagctgtggtcctgattcacttgagtgttttttagggacctactatgtgccaagcattgagctgcctctgatagtgaaggtagaatgtgatcaataatagctgtgtttaacaacactgttgtctgagctacttatgatgttagagcttgatgtcaggaaagccaggtgatcagagttgccattcagtatttggcctcactagtaatttcttcattgtataaagcagtgcttctcgtgcactagcaagcatcagcacacctggaagactcattaaaacacaaatttctggacccactcactgagttcctgcttcagtagatctggggtgagagctgacaatttgcatttctaacacatttgcaggtgatgttgctggtctggggaaaccacaatatgagcgccactgctgtcaattgaaataataacagttcccatatataggcgatttacctgtgccaggtgttatgtggacagctttacttgctttatgtcaattccagagagacttacaaaggaactattgatagctttaatttctgagatgaggtatctgagagtaaaagctgtgaaaaccctgttgaagctggcacagtgagtgggattggggctgagcccccgtctctctggctccagtcacattgctatccatgcttggtgcacccactgacttaccaagccactctacctccttggggacccttctccccatttaccaataagtcaccttcagataacactgggcaccccccaggcagtgcagatgccacctaacagaacattcccagttcctccttcaaattcttgggatgttgttgccttcaccccacttctccatgtgccataatcactcaataaattgttcctgtcattttaaatgtttgccttttaaatatcaataatcttgtttcaagattttctcttagtctttgggttttctgcagtttgaacataatatacctaagggtatgtgattgtggcttttgtttatttgttgcttgttttgtatttatcagttctctgggtctatcattcattttgaaacgttattagccattattactttgaacactcatgtgctgttctctctttttctggtattctgataatacatacataaagccttttgatgttgttccacagttcttaaggattctattgttttttgttaaatatgtttttctctttgcatttcagtttgggaagtttctgttgccatatgctcaagctcactgattctttccttggctctgtctgggctactgaagagcccatcaaaggcattcatcatttcttttgcagtgatttgattttttgtatttccttttgattctttcctagtattttcatcactctgcttatattacttatctgttgttgcatgttatctagtttttcactggaacccttaacatactaaccacagtattttaaattatctggctaataattcagagcaataggaactgaggtcaacaggccttagtgtgaggatttatgttcatctggctcagagttgggctgtgttcaatatttgctgtaggtgccagaagcctcgcctcttgaccttgagtcctgctcttcagagcctctgtctggagctgtttcaactgtaattcactgctgttatactgaagccctgttgttgaggtggtaaattgtaggggaaggggagtgtcctataatcatcaaattaaatctcagtctttcagtggggctctgtgtctggcctgtgacttcacaagtgtttcccccagccttaggtgagactggaaggctggagggagctgcagtagaaaatgcccttccccaggctggaatgaggctgagaagtctttcccttggagagtggaccttccaggggaaggagaaggtctggtgtctttcataaggaatactcttcctttccctgccaaagctgggagcagctctttccaggatcttcaccatcagaacctgaagggctcctggagataaaatccataaaagtgtgaggtctccccaaggctgcagtgaccagtcttacattgccttcttcagtctcacacattcagttcataggaatgtgtcaacttgatcatctaagtgttcctaccagtttatgtctacagcggcttctgctccagagaggcagagttcagctgtgattctctggactcatccagagatggagagattccagatttctgggtagtgacttaccctgttatcaaaaggcaaacttaaaacaaacttaaaggtcttaatgggcttttattttcaatttgtcaacacctcattctatagagtccgtgttctaatgagctgagcataggaagttggcttcatgggcagaaaggggctgaagaaagcagaaacagaaagcagattgggcactttgaagatattttccttgtaggactaaaacaaagagaactttcttattatgctgactggtcattttgaagatattttccttatgggactaaaacaaaggaaactttcttatgctgactcaggttaaccagaatctctcgttttttaggaaaactggttcatttcaaagttcagtttcattaggtagccctcagtacattgactctgttctggtctgcccagggcctagtgcaggaggccagtcctaaacaatggcctcccatgagctctgtttcacactgtgaactcagttctccaataggttcaagaaaggtcattgattttcagtttgtccaacttttatttgttggaaggactggagtgatgactctcaagctctttacatataaacttgaaacctaaactctcttccttatatgtaaaggaaaaatgccccctttcatgaatatatcaacgtatgtcatctgtcaactctttgacataatttacacactcagataagcccaatttttagcattttctaattgaacaagagacttatggttttttcccaggaaatgttgtgtccactctccattcccttgtaggagatttttgtcgggaaacaggagcccaggagagcccaggtgacaccattttagaattaatgccatcttaaaaccagcaaggcgcattccttgccaatcacaacccatggtcataagatgtttatggctaaggaagcagtttacaatgactgcaaggacaaactcctatgacaacaaaatgtccagatgccccaatgtacataaaaatatatgccttcaagatacttcttattatgctttgatgtacatatgcactaaaatgccaaatacagttttctttaaatcagcagaataataaattttgtcacgctgtcagcccgtctgcacatagtcatagcttagcttagcttttgcatagataagaccgctatggaagaaaaacttaaaacaaggatgatgtgttccttctctcactttctgaggatccccactctgtaattggagtagctttcaataaatgatctcattttattgtattctgtgactcaccttgaattccttcctgcacaagatccaagaaccctcccttggggtctggattgggactcctttttccagtaacaagataataaatgagagatggaattaattcaaaatagcacttgttggagtaacattaaggggtaaagatcataggaagttgggagaattacttcttgtttggtccaatatttgaaacactgtcatcaaatgagccccggatattttcatattatttaaatgactgacttctagcccctagattttatcttcccaggaatgtataagtaactttaacaacatgctgtattaaaacacattgacacaattatattacaaaatgagtgcattttttttcaatatattggaattaaaatacacaatcaaagtaataagaatttttcccactcctccttcccctcctggcaacctcacctccaggatttgtaacagagcctctgcccccagcaggcctttcctcaccagtgcttgcaaactgcaaattatatgcaagttgttaaaacagtgcctggaggcctttatcagcctgctaaggcttatacatgttttgtttggtagagaggaataaagcaattaaaatcggatgcattctgtttatatgtgcaatttaactaacatcaccagtgcctctcgatgtctcgaggtgctctctgataccaagaacacagagggatcttttctgaacttctcgcaggaagtgggtgaggcctcatggggtttgggaagtgtctcttcctttctccagaatcgtatgctttgtgggcagagatcttcaatggatttatctaaacaactgtgtgcagtgggaagtcaaagaccatggatttcagggaattaaaaagctgagggtttcaggaagaaaaagaaggcaatttgaggcatttggacttaatgaaacttactcagatggtgacagcagcattttcttggatgcacaattggccactggggatgctcatacagcattttttttttaaggacttggtggcttcccagacaggaagaatttgttttgactaattgtgttctctaatgaacccctaaacacacttcctctgataagcctgatgaagtgcttcacctgggaaaagtcttggtgctgattttctccacctggctctctgggctgcacttgaagctagcctggctccacgcttgccaactgattctccatcctcctccacacccaaatgacttgtttcatgatggccaagcgattaagacaatgatccagatagggcaggcatagaaagccatacacatgtatctttgaaacctttgatggttgtactttggcaaggaataaattatttgtattactattggattttccattcttttattccattgcttcactgatccatttggatgtcacacaagcctcaaatttaacaaatgtgaaatagaatgcttaatgctaatctctacaacttatttctccccctgttcacctactgttcctctttctgcagtgggctttccccagagtttcagatggcaggttccctctcattcttcgggtctcaccataagtgtcaccatcctagagagtcttttcttgaccacttgttacggaatgaattgtgtctctactccccatccctccaccacccctgcaattcatgtgctgaagctctaatccccctatgttacagcatctggagatggggcttttaggaggtcattaagtgtcaggcctctgagcccaagctaagccatcatatcccctgtgacctgcacgtatacatccagatggcctgaagtaactgaagaatcacaaaagaagtgaaaatggcctgttcctgccttaactgatgacattaccttgtaaaattccttctcctggctcatcctggctcaaaagctccccgactgagcaccttgtgatccccgcccctgcctgccagagaacatcccctttgactgtaattttcttttgcctacccaaatcctataaaacagtcctaccctttgctgactctctttttgaactcagtccgcctgcacccaggtgaaataaacagccttgttgctcgcacaaagcctgtttggtggtccctttacacggacacgagtgaaattaaggttaaatgaggtcataagagaggggtctatgaatttgcagacttaatggtggagctcatgcactctctcttcctccagggacacgcacagagggaaggctctgtggggttttgacaaaaaagagtcaaactctgtaaaatatttgaagggatttattctgagccacaaatgagtgaccaaggcctgaggcatggtctcaagaggtccagagaacatgtgctccaggtgattgggttatagcttgatctcatacattttcaggggatagaaattatagataaaaacagaaatgaatacgtgcaaggtgtacattggtttggcctggagaggcaggggctcccaggtcataggtggatttaaagatttcctgatggcagtttgttgacagggttaagctctgcctgaagagttgaagtcagcagaaagaaatgctaagataaggagggttgtggaagccaaatttcttgttatgtagatgaagcctctaggtagcgggcctcagaaaatagatattaatagtaaatgtcttttatcaggtgctaaaatgtgccagactcttagttaaatctctcctgggtaggaaactacctggaaagggaaggggattctctatggaatgtagattttccccatgagagacagctttgcaggaccatttcaaaatatgtcaatgaaatatgttctgggggaaaatactttgatttctttcagggcctgctatctgtcatgtgacgttctactagagtcaggttggaatttgatatcttattgctacatggattttcttctgtcagtcttaagatctacattttaatgttaaagctggtcagttgtgcctgaattccaggggaggagggtataaggaggcatgtcggacacccacttcccatcatggtctgaaccagtttattttgaaatccccttggccaagaggagggtgccttcagtcaggggactttgaattttatttttggtttacagaggacattgtgacaaggtggccatttgcaacccaggaagtgaggcctcaccagaacccgaccatgctggcacctgattttggacttacagcctccagaactatgagaaaatccatctcttttggtttaagccaccaagtctgtgatattatgttatg
